(19) United States
(12) Patent Application Publication
(10) Pub. No.: US 2023/0116689 A1
(43) Pub. Date: Apr. 13, 2023

(54) METHODS AND BIOLOGICAL SYSTEMS FOR DISCOVERING AND OPTIMIZING LASSO PEPTIDES

(71) Applicant: Lassogen, Inc., San Diego, CA (US)

(72) Inventors: Mark J. Burk, San Diego, CA (US); I-Hsiung Brandon Chen, La Mesa, CA (US)

(21) Appl. No.: 17/906,102

(22) PCT Filed: Mar. 18, 2021
(86) PCT No.: PCT/US2021/023000

§ 371 Date: Sep. 12, 2022

Related U.S. Application Data
(60) Provisional application No. 62/992,105, filed on Mar. 19, 2020.

(51) Int. Cl. C12N 15/10; G01N 33/68; C07K 14/005

(52) U.S. Cl. CPC C12N 15/1037; C12N 15/1058; G01N 33/6845; C07K 14/005; C07K 2319/02; C07K 2319/034; C07K 2319/50; C12N 2795/10122; C12N 2795/10141; C12N 2795/14122; C12N 2795/14141

(57) ABSTRACT

Provided herein are lasso peptides libraries, and particularly phage display libraries of lasso peptides. Also provided herein are related methods and systems for producing the libraries and for screening the libraries to identify candidate lasso peptides having desirable properties.

[0001] This application claims the benefit of priority to U.S. Provisional Patent Application No. 62/992,105 filed Mar. 19, 2020, the disclosure of which is incorporated by reference herein in its entirety.

[0002] The instant application contains a Sequence Listing which has been submitted electronically in ASCII format and is hereby incorporated by reference in its entirety. Said ASCII copy, created on Mar. 18, 2021, is named 14619-008-228_Sequence Listing.txt and is 1,710,453 bytes in size.

### 1. FIELD

[0003] Provided herein are biological systems and related methods for discovering and optimizing lasso peptides.

### 2. BACKGROUND

[0004] Peptides serve as useful tools and leads for drug development since they often combine high affinity and specificity for their target receptor with low toxicity. However, their clinical use as efficacious drugs has been limited due to undesirable physicochemical and pharmacokinetic properties, including poor solubility and cell permeability, low bioavailability, and instability due to rapid proteolytic degradation under physiological conditions.

[0005] Ribosomally assembled natural peptides having a knotted topology may be used as molecular scaffold for drug design. For example, ribosomally assembled natural peptides sharing the cyclic cystine knot (CCK) motif as exemplified by the cyclotides and conotoxins, recently have been introduced as stable molecular frameworks for potential therapeutic applications (Weidmann, J.; Craik, D. J., J. Experimental Bot., 2016, 67, 4801-4812; Burman, R., et al., J. Nat. Prod. 2014, 77, 724-736; Reinwarth, M., et al., Molecules, 2012, 17, 12533-12552; Lewis, R. J., et al., Pharmacol. Rev., 2012, 64, 259-298). But these knotted peptides require the formation of three disulfide bonds to hold them into a defined conformation. As the biosynthetic machinery of plant-derived cyclotides and animal-derived conotoxins is not well understood, these knotted peptide scaffolds are not readily accessible by genetic manipulation and heterologous production in cells and discovery relies on traditional extraction and fractionation methods that are slow and costly. Moreover, their production relies either on solid phase peptide synthesis (SPPS) or on expressed protein ligation (EPL) methods to generate the circular peptide backbone, followed by oxidative folding to form the correct three disulfide bonds required for the knotted structure (Craik, D. J., et al., Cell Mol. Life Sci. 2010, 67, 9-16; Berrade, L. & Camarero, J. A. Cell Mol. Life Sci., 2009, 66, 3909-22).

[0006] There exists a need for new classes of peptide-based diagnostic and therapeutic compounds with readily available methods for their discovery, genetic manipulation and evolution, cost-effective production, and high-throughput screening. The present disclosure provided herein meet these needs.

### 3. SUMMARY

[0007] Provided herein are lasso peptides and related molecules, libraries and compositions. Also provided herein are methods for optimizing and screening lasso peptide libraries for candidates having desirable properties.

[0008] In one aspect, provided herein are fusion proteins comprising a bacteriophage coat protein fused to a lasso peptide component. In some embodiments the bacteriophage coat protein comprises p3, p6, p7, p8 or p9 of filamentous phages, small outer capsid (SOC) protein or highly antigenic outer capsid (HOC) protein of a T4 phage, pX of a T7 phage, pD or pV of a (lambda) phage or a functional variant thereof. In some embodiments, the functional variant is selected from a truncation, deletion, insertion, mutation, conjugation, domain-shuffling or domain-swapping.

[0009] In some embodiments, the lasso peptide component is a lasso precursor peptide, a lasso core peptide, a lasso peptide or a functional fragment of lasso peptide. In some embodiments, the lasso precursor peptide comprises a sequence of any one of the even numbers of SEQ ID NOS:1-2630, or a sequence having greater than 30% identity of any one of the even numbers of SEQ ID NOS:1-2630.

[0010] In some embodiments, the fusion protein further comprises a periplasmic secretion signal. In some embodiments, the periplasmic secretion signal is a periplasmic space targeting signal sequence derived from TorA, PelB, OmpA, pIII, PhoA, DsbA, TolB, TorT, a substrate of the Type II Secretion System (T2SS), or a functional variant thereof.

[0011] In some embodiments, the bacteriophage coat protein is fused to the lasso peptide component via a first linker. In some embodiments, the first linker is a cleavable linker. In some embodiments, the lasso peptide fragment comprises at least one unusual amino acid or unnatural amino acid.

[0012] In some embodiments, the fusion protein provided herein is encoded by a nucleic acid molecule. In some embodiments, the nucleic acid comprises a sequence of any one of the odd numbers of SEQ ID NOS:1-2630, or a sequence having greater than 30% identity of any one of the odd numbers of SEQ ID NOS:1-2630. In some embodiments, the nucleic acid molecule is a phagemid.

[0013] In some embodiments, the bacteriophage coat protein is derived from a filamentous bacteriophage, a polyhedral bacteriophage, a tailed bacteriophage, or a pleomorphic bacteriophage. In some embodiments, the bacteriophage coat protein is derived from an M13 phage, T4 phage, T7 phage or λ (lambda) phage.

[0014] In one aspect, provided herein are fusion proteins comprising at least one lasso peptide biosynthesis component fused to a secretion signal. In some embodiments, the secretion signal is a periplasmic secretion signal. In some embodiments, the periplasmic secretion signal is a periplasmic space targeting signal sequence derived from TorA, PelB, OmpA, pIII, PhoA, DsbA, TolB, TorT, a substrate of the Type II Secretion System (T2SS), or a functional variant thereof. In some embodiments, the secretion signal is an extracellular secretion signal. In some embodiments, the extracellular secretion signal is an extracellular space targeting signal sequence derived from HlyA, a substrate of the Type 1 Secretion System (TISS), or a functional variant thereof.

[0015] In some embodiments, the at least one lasso peptide biosynthesis component is a lasso peptidase, a lasso cyclase or a lasso RiPP Recognition Element (RRE). In some embodiments, the lasso peptidase comprises a sequence of any one of peptide Nos: 1316-2336, or a sequence having greater than 30% identity of any one of peptide Nos: 1316-2336. In some embodiments, the lasso cyclase comprises a sequence of any one of peptide Nos: 2337-3761, or a sequence having greater than 30% identity of any one of peptide Nos: 2337-3761. In some embodiments, the lasso RRE comprises a sequence of any one of peptide Nos: 3762-4593, or a sequence having greater than 30% identity of any one of peptide Nos: 3762-4593.

[0016] In some embodiments, the fusion protein comprises the lasso peptidase and the lasso RRE. In some embodiments, the fusion protein comprises a sequence of any one of peptide Nos: 3768, 3770, 3793, 3811, 3818, 3851, 3855, 3887, 4004, 4018, 4045, 4076, 4132, 4150, 4167, 4168, 4225, 4262, 4379, 4414, 4499, 4504, 4507, 4512, 4517, 4518, 4529, 4532, 4542, 4559, 4561, 4562, or a sequence having greater than 30% identity of any one of peptide Nos: 3768, 3770, 3793, 3811, 3818, 3851, 3855, 3887, 4004, 4018, 4045, 4076, 4132, 4150, 4167, 4168, 4225, 4262, 4379, 4414, 4499, 4504, 4507, 4512, 4517, 4518, 4529, 4532, 4542, 4559, 4561, 4562.

[0017] In some embodiments, the fusion protein comprises the lasso cyclase and the lasso RRE. In some embodiments, the fusion protein comprises a sequence selected from peptide Nos: 2504, 3608 or a sequence having greater than 30% identity of any one of peptide Nos: 2504 and 3608. In some embodiments, the fusion protein comprises the lasso peptidase and the lasso cyclase. In some embodiments, the fusion protein comprises a sequence having peptide No: 2903 or a sequence having greater than 30% identity thereof. In some embodiments, the fusion protein comprises the lasso peptidase, the lasso cyclase and the lasso RRE.

[0018] In some embodiments, the fusion protein comprises more than one lasso peptide biosynthesis component fused together via a first cleavable linker. In some embodiments, the lasso peptide biosynthesis component is fused to the secretion signal via a second cleavable linker.

[0019] In some embodiments, the fusion protein provided herein is encoded by a nucleic acid molecule. In some embodiments, the nucleic acid comprises a sequence of any one of the odd numbers of SEQ ID NOS:1-2630, or a sequence having greater than 30% identity of any one of the odd numbers of SEQ ID NOS:1-2630. In some embodiments, the nucleic acid molecule is a phagemid. In some embodiments, the nucleic acid comprises a sequence encoding any one of peptide Nos: 1316-2336, 2337-3761 and 3762-4593, or a peptide having greaterthan 30% sequence identity of any one of peptide Nos: 1316-2336, 2337-3761 and 3762-4593.

[0020] In one aspect, provided herein is a system comprising multiple nucleic acid sequences. Particularly, in some embodiments, the system comprising (i) a first nucleic acid sequence encoding one or more structural proteins of a bacteriophage; (ii) a second nucleic acid sequence encoding at least one lasso peptide component; and (iii) a third nucleic acid sequence encoding at least one lasso peptide biosynthesis component.

[0021] In some embodiments, the first nucleic acid sequence is one or more plasmid. In some embodiments, the bacteriophage is an M13 phage, a fd phage or a fl phage. In some embodiments, the first nucleic acid sequence encodes one or more of p3, p6, p7, p8 or p9 of filamentous phages, or a functional variant thereof.

[0022] In some embodiments, the third nucleic acid sequence encodes one or more fusion protein each comprising at least one lasso peptide biosynthesis component fused to a (a) first secretion signal or (b) purification tag. In some embodiments, the at least one lasso peptide biosynthesis component comprises one or more of a lasso peptidase, a lasso cyclase and a lasso RRE.

[0023] In some embodiments, the third nucleic acid sequence encodes a first fusion protein comprising a lasso peptidase and the (a) first secretion signal or (b) purification tag. In some embodiments, the third nucleic acid sequence further encodes a second fusion protein comprising a lasso cyclase and the (a) first secretion signal or (b) purification tag.

[0024] In some embodiments, the third nucleic acid sequence further encodes a third fusion protein comprising a lasso RRE and the (a) first secretion signal or (b) purification tag. In some embodiments, third nucleic acid sequence encodes a first fusion protein comprising a lasso peptidase, a lasso cyclase and the (a) first secretion signal or (b) purification tag. In some embodiments, the third nucleic acid sequence further encodes a second fusion protein comprising an RRE and the (a) first secretion signal or (b) purification tag.

[0025] In some embodiments, the third nucleic acid sequence encodes a first fusion protein comprising a lasso peptidase, a lasso RRE and the (a) first secretion signal or (b) purification tag. In some embodiments, the third nucleic acid sequence further encodes a second fusion protein comprising a lasso cyclase and the (a) first secretion signal or (b) purification tag.

[0026] In some embodiments, wherein the third nucleic acid sequence encodes a first fusion protein comprising a lasso cyclase, a lasso RRE and the (a) first secretion signal or (b) purification tag. In some embodiments, the third nucleic acid sequence further encodes a second fusion protein comprising a lasso peptidase and the (a) first secretion signal or (b) purification tag.

[0027] In some embodiments, the third nucleic acid sequence encodes a fusion protein comprising a lasso peptidase, a lasso cyclase, a lasso RRE and the (a) first secretion signal or (b) purification tag.

[0028] In some embodiments, the first secretion signal is a periplasmic secretion signal. In some embodiments, the first secretion signal is an extracellular secretion signal. In some embodiments, the third nucleic acid sequence is one or more plasmid. In some embodiments, the second nucleic acid sequence encodes a fourth fusion protein comprising a lasso peptide component, a bacteriophage coat protein and a second secretion signal, and wherein the second secretion signal is a periplasmic secretion signal. In some embodiments, the lasso peptide component is a lasso precursor peptide, a lasso core peptide, a lasso peptide or a functional fragment of lasso peptide.

[0029] In some embodiments, the lasso precursor peptide or the lasso core peptide is fused to the bacteriophage coat protein via a cleavable linker. In some embodiments, the bacteriophage coat protein comprises p3, p6, p8 or p9 of filamentous phages, or a functional variant thereof. In some embodiments, the second nucleic acid sequence is a plasmid or a phagemid.

[0030] In some embodiments, the second nucleic acid sequence comprises a sequence of (i) any one of the odd numbers of SEQ ID NOS:1-2630, (ii) a sequence having greater than 30% identity of any one of the odd numbers of SEQ ID NOS:1-2630, or (iii) a sequence encoding a polypeptide having greater than 30% identity of any one of the even numbers of SEQ ID NOS:1-2630.

[0031] In some embodiments, the third nucleic acid sequence comprises a sequence encoding a polypeptide having greater than 30% identify of any one of peptide Nos: 1316-2336, peptide Nos: 2337-3761, and peptide Nos: 3762-4593.

[0032] In some embodiments, two or more of the first nucleic acid sequence, the second nucleic acid sequence and the third nucleic acid sequence are in the same nucleic acid molecule. In some embodiments, the nucleic acid molecule is a phagemid.

[0033] In some embodiments, the periplasmic secretion signal is aperiplasmic space targeting signal sequence derived from TorA, PelB, OmpA, pIII, PhoA, DsbA, TolB, TorT, a substrate of the Type II Secretion System (T2SS), or a functional variant thereof. In some embodiments, the extracellular secretion signal is an extracellular space-targeting signal sequence derived from HlyA or a substrate of the Type 1 Secretion System (T1SS), or a functional variant thereof.

[0034] In some embodiments, the purification tag is Albumin-binding protein (ABP), Alkaline Phosphatase (AP), AU1 epitope, AU5 epitope, Bacteriophage 17 epitope (T7 tag), Bacteriophage V5 epitope (V5 tag), Biotin-carboxy carrier protein (BCCP), Bluetongue virus tag (B-tag), Calmodulin binding peptide (CBP), Chloramphenicol Acetyl Transferase (CAT), Cellulose binding domain (CBD), Chitin binding domain (CBD), Choline-binding domain (CBD), Dihydrofolate reductase (DHFR), E2 epitope, FLAG epitope, Galactose-binding protein (GBP), Green fluorescent protein (GFP), Glu-Glu (EE-tag), Glutathione-S-transferase (GST), Human influenza hemagglutinin (HA), HaloTag®, Histidine affinity tag (HAT), Horseradish peroxidase (HRP), HSV epitope, Ketosteroid isomerase (KSI), KT3 epitope, LacZ, Luciferase, Maltose-binding protein (MBP), Myc epitope, NusA, PDZ ligand, Polyarginine (Arg-tag), Polyaspartate (Asp-tag), Polycysteine (Cys-tag), Polyhistidine (His-tag), Polyphenylalanine (Poly-tag), Profinity eXact™, Protein C, S1-tag, S-tag, Streptavidin-binding peptide (SBP), Staphylococcal protein A (Protein A), Staphylococcal protein G (Protein G), Strep-tag, Streptavidin, Small Ubiquitin-like Modifier (SUMO), Tandem Affinity Purification (TAP), T7 epitope, Thioredoxin (Trx), TrpE, Ubiquitin, Universal, VSV-G.

[0035] In some embodiments, the system further comprises a bacterial cell having an intracellular space, wherein the first and second nucleic acid sequences are in the intracellular space of the bacterial cell. In some embodiments, the third nucleic acid sequence is in the intracellular space of the bacterial cell. In some embodiments, the bacterial cell further comprises a periplasmic space, and wherein the at least one lasso peptide biosynthesis component encoded by the third nucleic acid sequence is in the periplasmic space or the extracellular space. In some embodiments, the third nucleic acid sequence is not in the intracellular space of the bacterial cell. In some embodiments, the bacterial cell is a cell of E. coli. In some embodiments, the lasso peptide fragment comprises at least one unusual amino acid or unnatural amino acid.

[0036] In one aspect, provided herein are non-naturally existing bacteriophages. In some embodiments, the phage comprises a first coat protein and a phagemid, wherein the first coat protein is fused to a lasso peptide component, and wherein the phagemid encodes at least a portion of the lasso peptide component. In some embodiments, the phagemid encodes a fusion protein comprising the first coat protein and the lasso peptide component. In some embodiments, the fusion protein further comprises a periplasmic secretion signal. In some embodiments, the fusion protein further comprises a cleavable linker.

[0037] In some embodiments, the first coat protein is p3, p6, p7, p8 or p9 of filamentous phages or a functional variant thereof. In some embodiments, the phagemid further encodes at least one lasso peptide biosynthesis component. In some embodiments, the phagemid encodes a fusion protein comprising the lasso peptide biosynthesis component and a secretion signal. In some embodiments, the secretion signal is a periplasmic secretion signal or an extracellular secretion signal. In some embodiments, the phagemid comprises a nucleic acid sequence of (i) any one of the odd numbers of SEQ ID NOS:1-2630, (ii) a sequence having greater than 30% identity of any one of the odd numbers of SEQ ID NOS:1-2630, or (iii) a sequence encoding a polypeptide having greater than 30% identify of any one of the even numbers of SEQ ID NOS:1-2630, peptide Nos: 1316-2336, peptide Nos: 2337-3761, and peptide Nos: 3762-4593.

[0038] In some embodiments, the phagemid further encodes at least one structural protein. In some embodiments, the at least one structural protein comprises p3, p6, p7, p8 or p9 of filamentous phages or a functional variant thereof. In some embodiments, the phage is an M13 phage. In some embodiments, the bacteriophage is in a culture medium of bacteria. In some embodiments, the culture medium thither comprises a bacterial host of the bacteriophage. In some embodiments, the culture medium thither comprises at least one lasso peptide biosynthesis component secreted by the bacterial host. In some embodiments, the bacterial host is E. coli. In some embodiments, the bacteriophage is purified.

[0039] In some embodiments, the bacteriophage is in contact with at least one lasso peptide biosynthesis component. In some embodiments, the at least one lasso peptide biosynthesis component is recombinantly produced or purified. In some embodiments, the lasso peptide component is a lasso precursor peptide and the at least one lasso biosynthesis component comprises a lasso peptidase and a lasso cyclase.

[0040] In some embodiments, the lasso peptide component is a lasso core peptide and the at least one lasso biosynthesis component comprises a lasso cyclase. In some embodiments, the lasso biosynthesis component thither comprises a lasso RRE. In some embodiments, two or more of the lasso peptidase, lasso cyclase and lasso RRE are fused together. In some embodiments, the lasso peptide component is a lasso peptide or a functional fragment of lasso peptide.

[0041] In some embodiments, the lasso peptide component comprises at least one unusual or unnatural amino acid. In some embodiments, the bacteriophage is a filamentous bacteriophage, a polyhedral bacteriophage, a tailed bacteriophage, or a pleomorphic bacteriophage.

[0042] In one aspect, provided herein are compositions comprising non-naturally existing bacteriophages. In some embodiments, the composition comprising at least two non-naturally existing bacteriophages according to any one of claims 73 to 96. In some embodiments, the lasso peptide components of the at least two non-naturally existing bacteriophages are the same. In some embodiments, each of the lasso peptide components of the at least two non-naturally existing bacteriophages is unique. In some embodiments, multiple bacteriophages as described herein are included in a phage display library.

[0043] In one aspect, provided herein are bacterial cells comprising the nucleic acid systems as described herein. In some embodiments, the bacterial cell is a cell of E. coli. In some embodiments, the bacterial cell is a cell of genetically engineered E. coli. In some embodiments, the genetically engineered E. coli cell comprises a nucleic acid sequence encoding a modified aminoacyl-tRNA synthetase (aaRS) capable of recognizing an unusual or unnatural amino acid residue. In some embodiments, the bacterial cell thither comprises a complementary tRNA that is aminoacylated by the modified aminoacyl-tRNA synthetase (aaRS). In some embodiments, the bacterial cell is included in a culture medium. In some embodiments, the culture medium comprises natural, non-natural or unusual amino acid residues.

[0044] In some embodiments, non-naturally existing bacteriophage described herein, or the composition described herein, or the bacteriophage display library described herein, or the bacterial cell described, or the cultural medium described herein, is in contact with a target molecule that is capable of binding to the lasso peptide component. In some embodiments, the target molecule is a cell surface protein or a secreted protein. In some embodiments, the cell surface protein comprises a transmembrane domain. In some embodiments, the cell surface protein does not comprise a transmembrane domain. In some embodiments, the target molecule is capable of modulating a cellular activity in a cell expressing the target molecule.

[0045] In one aspect, provided herein are methods for making a member of a bacteriophage display library. In some embodiments, the method comprises providing a system comprising (i) a first nucleic acid sequence encoding one or more structural proteins of a bacteriophage; (ii) a phagemid comprising a second nucleic acid sequence encoding a lasso peptide component fused to a bacteriophage coat protein; and (iii) a third nucleic acid sequence encoding at least one lasso peptide biosynthesis component; introducing the system into a population of bacterial cells; culturing the population of bacterial cells under a suitable condition to produce a plurality of bacteriophages each displaying the lasso peptide component on the coat protein; and wherein the lasso peptide biosynthesis component processes the lasso peptide component into a lasso peptide or a functional fragment of lasso peptide.

[0046] In some embodiments of the method, the bacterial cell comprises a periplasmic space, and wherein the lasso peptide component is fused to a first periplasmic secretion signal. In some embodiments, lasso peptide biosynthesis component is fused to a second periplasmic secretion signal; and wherein the lasso peptide biosynthesis component processes the lasso peptide component into the lasso peptide or functional fragment of lasso peptide in the periplasmic space. In some embodiments, the lasso peptide biosynthesis component is fused to an extracellular secretion signal; and wherein the lasso peptide biosynthesis component processes the lasso peptide component into the lasso peptide or functional fragment of lasso peptide in the extracellular space.

[0047] In one aspect, provided herein are methods for making a member of bacteriophage display library. In some embodiments, the method comprises providing a system comprising (i) a first nucleic acid sequence encoding one or more structural proteins of a bacteriophage; and (ii) a phagemid comprising a second nucleic acid sequence encoding a lasso peptide component fused to a bacteriophage coat protein; introducing the system into a population of bacterial cells; and culturing the population of bacterial cells under a first suitable condition to produce a plurality of bacteriophages each displaying the lasso peptide component on the coat protein; contacting the plurality of bacteriophages with at least one purified lasso peptide biosynthesis component under a second suitable condition to allow the lasso peptide biosynthesis component to process the lasso peptide component into a lasso peptide or functional fragment of lasso peptide.

[0048] In some embodiments, the plurality of bacteriophages are purified before the step of contacting. In some embodiments, the contacting is performed by adding a purified lasso peptide biosynthesis component into a culture medium containing the bacteriophages. In some embodiments, the population of bacterial cells are cells of E. coli as provided herein. In some embodiments, the lasso peptide components of the plurality of bacteriophages are the same. In some embodiments, each of the lasso peptide components of the plurality of bacteriophages is unique. In some embodiments, the system is the system as provided herein.

[0049] In one aspect, provided herein are methods for evolving a lasso peptide of interest for a target property. In some embodiments, the method comprises (a) providing a first bacteriophage display library comprising members derived from the lasso peptide of interest, wherein each member of the first lasso peptide display library comprises at least one mutation to the lasso peptide of interest; (b) subjecting the library to a first assay under a first condition to identify members having the target property; (c) identifying the mutations of the identified members as beneficial mutations; and (d) introducing the beneficial mutations into the lasso peptide of interest to provide an evolved lasso peptide.

[0050] In some embodiments, the method further comprises: (f) providing an evolved bacteriophage display library of lasso peptides comprising members derived from the evolved lasso peptide, wherein the members of the evolved bacteriophage display library retain at least one beneficial mutation; (g) repeating steps (b) through (d). In some embodiments, the method further comprises repeating steps f and g for at least one more round.

[0051] In some embodiments, the evolved bacteriophage display library is subjected to the first assay under a second condition more stringent for the target property than the first condition. In some embodiments, the evolved bacteriophage display library is subjected to a second assay to identify members having the target property. In some embodiments, the method further comprises validating the evolved lasso peptide using at least one additional assay different from the first or second assay.

[0052] In some embodiments, the target property comprises binding affinity for a target molecule. In some embodiments, the target property comprises binding specificity for a target molecule. In some embodiments, the target property comprises capability of modulating a cellular activity or cell phenotype. In some embodiments, the modulation is antagonist modulation or agonist modulation. In some embodiments, the mutation comprises substituting at least one amino acid with an unusual or unnatural amino acid. In some embodiments, the target property is at least two target properties screened simultaneously.

[0053] In one aspect, provided herein are methods for identifying a lasso peptide that specifically binds to a target molecule. In some embodiments, the method comprises providing a bacteriophage display library comprising a plurality of members, each member comprising a lasso peptide or a functional fragment of lasso peptide; contacting the library with the target molecule under a suitable condition that allows at least one member of the library to form a complex with the target molecule; and identifying the member of in the complex.

[0054] In some embodiments, the contacting is performed by contacting the library with the target molecule in the presence of a reference binding partner of the target molecule under a suitable condition that allows at least one member of the library to compete with the reference binding partner for binding to the target molecule; and wherein the identifying step is performed by detecting reduced binding of the reference binding partner to the target molecule; and identifying the member responsible for the reduced binding.

[0055] In some embodiments, the reference binding partner is a ligand for the target molecule. In some embodiments, the target molecule comprises one or more target sites, and the reference binding partner specifically binds to a target site of the target molecule. In some embodiments, the reference binding partner is a natural ligand or synthetic ligand for the target molecule. In some embodiments, the target molecule is at least two target molecules.

[0056] In one aspect, provided herein are methods for identifying a lasso peptide that modulates a cellular activity. In some embodiments, the method comprises (a) providing a bacteriophage display library comprising a plurality of members, each member comprising a lasso peptide or a functional fragment of lasso peptide; (b) subjecting the library to a suitable biological assay configured for measuring the cellular activity; (c) detecting a change in the cellular activity; and (d) identifying the members responsible for the detected change. In some embodiments, the step (b) is performed by subjecting the library to multiple biological assays configured for measuring the cellular activity; and the method further comprises selecting the members that have a high probability of being identified as responsible for the detected change in the cellular activity.

[0057] In one aspect, provided herein are methods for identifying an agonist or antagonist lasso peptide for a target molecule. In some embodiments, the method comprises providing a bacteriophage display library comprising a plurality of members, each member comprising a lasso peptide or a functional fragment of lasso peptide; contacting the library with a cell expressing the target molecule under a suitable condition that allows at least one member of the library to bind to the target molecule; measuring a cellular activity mediated by the target molecule; and identifying the member as an agonist ligand for the target molecule if said cellular activity is increased; or identifying the member as an antagonist ligand if said cellular activity is decreased.

[0058] In one aspect, provided herein is a nucleic acid molecule comprising a first sequence encoding one or more structural proteins of a bacteriophage and a second sequence encoding a first fusion protein comprising a lasso peptide component fused to a first coat protein of the bacteriophage. In some embodiments, the second sequence further encodes a second fusion protein comprising an identification peptide fused to a second coat protein of the bacteriophage. In some embodiments, the nucleic acid molecule is a mutated genome of the bacteriophage, wherein one or more endogenous sequence encoding the first and/or second coat protein(s) is deleted from the genome. In some embodiments, at least one of the first and second coat proteins is a nonessential outer capsid protein of the bacteriophage. In some embodiments, the second sequence is an exogenous sequence.

[0059] In some embodiments, the bacteriophage is a non-naturally occurring T4 phage, T7 phage or λ (lambda) phage. In some embodiments, the nucleic acid molecule is a mutated genome of the T4 phage with endogenous sequences coding for HOC and/or SOC deleted. In some embodiments, the second sequence encodes a fusion protein comprising the lasso peptide component fused to HOC. In some embodiments, the second sequence encodes a fusion protein comprising the identification peptide fused to SOC. In some embodiments, the lasso peptide component is a lasso precursor peptide, a lasso core peptide, a lasso peptide or a functional fragment of lasso peptide. In some embodiments, the lasso precursor peptide comprises a sequence of any one of the even numbers of SEQ ID NOS:1-2630, or a sequence having greater than 30% identity of any one of the even numbers of SEQ ID NOS:1-2630. In some embodiments, the nucleic acid comprises a sequence of any one of the odd numbers of SEQ ID NOS:1-2630, or a sequence having greater than 30% identity of any one of the odd numbers of SEQ ID NOS:1-2630.

[0060] In some embodiments, the identification peptide is a purification tag. In some embodiments, the purification tag is Albumin-binding protein (ABP), Alkaline Phosphatase (AP), AU1 epitope, AU5 epitope, Bacteriophage 17 epitope (T7 tag), Bacteriophage V5 epitope (V5 tag), Biotin-carboxy carrier protein (BCCP), Bluetongue virus tag (B-tag), Calmodulin binding peptide (CBP), Chloramphenicol Acetyl Transferase (CAT), Cellulose binding domain (CBD), Chitin binding domain (CBD), Choline-binding domain (CBD), Dihydrofolate reductase (DHFR), E2 epitope, FLAG epitope, Galactose-binding protein (GBP), Green fluorescent protein (GFP), Glu-Glu (EE-tag), Glutathione-S-transferase (GST), Human influenza hemagglutinin (HA), HaloTag®, Histidine affinity tag (HAT), Horseradish peroxidase (HRP), HSV epitope, Ketosteroid isomerase (KSI), KT3 epitope, LacZ, Luciferase, Maltose-binding protein (MBP), Myc epitope, NusA, PDZ ligand, Polyarginine (Arg-tag), Polyaspartate (Asp-tag), Polycysteine (Cys-tag), Polyhistidine (His-tag), Polyphenylalanine (Poly-tag), Profinity eXact™, Protein C, S1 tag, S-tag, Streptavidin-binding peptide (SBP), Staphylococcal protein A (Protein A), Staphylococcal protein G (Protein G), Strep-tag, Streptavidin, Small Ubiquitin-like Modifier (SUMO), Tandem Affinity Purification (TAP), T7 epitope, Thioredoxin (Trx), TrpE, Ubiquitin, Universal, VSV-G.

[0061] In some embodiments, the first fusion protein further comprises a linker between the first protein and the lasso peptide component. In some embodiments, the linker is a cleavable linker.

[0062] In one aspect, provided herein are systems comprising multiple nucleic acid sequences. In some embodiments, the system comprising (i) a first nucleic acid sequence encoding one or more structural proteins of a bacteriophage; (ii) a second nucleic acid sequence encoding a first fusion protein comprising a lasso peptide component fused to a first coat protein of the bacteriophage; and (iii) a third nucleic acid sequence encoding at least one lasso peptide biosynthesis component. In some embodiments, the second nucleic acid sequence further encodes a second fusion protein comprising an identification peptide fused to a second coat protein of the bacteriophage.

[0063] In some embodiments, the first nucleic acid sequence does not encode the first and/or second nonessential outer capsid protein(s) of the bacteriophage. In some embodiments, the first nucleic acid sequence is a mutated genome of the bacteriophage. In some embodiments, the first nucleic acid sequence encodes the first and/or second coat protein(s) of the bacteriophage. In some embodiments, the first nucleic acid sequence is a wild-type genome of the bacteriophage. In some embodiments, at least one of the first and second coat proteins is a nonessential outer capsid protein of the bacteriophage.

[0064] In some embodiments, the bacteriophage is a non-naturally occurring T4 phage, T7 phage, or λ (lambda) phage. In some embodiments, the first nucleic acid sequence and the second nucleic acid sequence are in separate nucleic acid molecules. In some embodiments, comprising a site-specific recombinase capable of catalyzing homologous recombination between the first and second nucleic acid sequences to produce a recombinant sequence; wherein the recombinant sequence encodes for the one or more structural proteins of the bacteriophage and the first and/or second fusion protein.

[0065] In some embodiments, the mutated phage genome is T4 phage genome devoid of one or more sequence coding for the first and/or second nonessential outer capsid protein(s). In some embodiments, the second nucleic acid sequence is a plasmid. In some embodiments, the first nucleic acid sequence and the second nucleic acid sequence are in the same nucleic acid molecule. In some embodiments, the nucleic acid molecule is a mutated genome of the bacteriophage devoid of one or more endogenous sequence encoding the first and/or second nonessential outer capsid protein(s). In some embodiments, the second sequence is an exogenous sequence.

[0066] In some embodiments, the nucleic acid molecule is a mutated genome of the T4 phage with endogenous sequences coding for HOC and/or SOC deleted. In some embodiments, the second sequence encodes a fusion protein comprising the lasso peptide component fused to HOC. In some embodiments, the second sequence encodes a fusion protein comprising the identification peptide fused to SOC.

[0067] In some embodiments, the lasso peptide component is a lasso precursor peptide, a lasso core peptide, a lasso peptide or a functional fragment of lasso peptide.

[0068] In some embodiments, the lasso precursor peptide comprises a sequence of any one of the even numbers of SEQ ID NOS:1-2630, or a sequence having greater than 30% identity of any one of the even numbers of SEQ ID NOS:1-2630. In some embodiments, the nucleic acid comprises (i) a sequence of any one of the odd numbers of SEQ ID NOS:1-2630, (ii) a sequence having greater than 30% identity of any one of the odd numbers of SEQ ID NOS:1-2630, or (iii) a sequence encoding a polypeptide having greater than 30% identity of any one of the even numbers of SEQ ID NOS:1-2630.

[0069] In some embodiments, the third nucleic acid sequence encodes one or more lasso peptide biosynthesis component. In some embodiments, the at least one lasso peptide biosynthesis component comprises one or more of a lasso peptidase, a lasso cyclase and a lasso RRE. In some embodiments, the third nucleic acid sequence encodes a lasso peptidase. In some embodiments, the third nucleic acid sequence further encodes a lasso cyclase. In some embodiments, the third nucleic acid sequence further encodes a lasso RRE. In some embodiments, the third nucleic acid sequence encodes a fusion protein comprising a lasso peptidase and a lasso cyclase. In some embodiments, the third nucleic acid sequence further encodes a lasso RRE. In some embodiments, the third nucleic acid sequence encodes a fusion protein comprising a lasso peptidase and a lasso RRE. In some embodiments, the third nucleic acid sequence further encodes a lasso cyclase. In some embodiments, the third nucleic acid sequence encodes a fusion protein comprising a lasso cyclase and a lasso RRE. In some embodiments, the third nucleic acid sequence further encodes a lasso peptidase. In some embodiments, the third nucleic acid sequence encodes a fusion protein comprising a lasso peptidase, a lasso cyclase, and a lasso RRE.

[0070] In some embodiments, the third nucleic acid sequence comprises a sequence encoding a polypeptide having greater than 30% identify of any one of peptide Nos: 1316-2336, peptide Nos: 2337-3761, and peptide Nos: 3762-4593. In some embodiments, the third nucleic acid sequence is one or more plasmid.

[0071] In some embodiments, comprising a microbial cell having cytoplasm, wherein the first, second and third nucleic acid sequences are in the cytoplasm of the microbial cell. In some embodiments, the microbial cell is a bacterial cell or an archaea cell. In some embodiments, the bacterial cell is E. coli. In some embodiments, the system further comprises a cell-free biosynthesis reaction mixture, wherein the first, second and third nucleic acid sequence are in the cell-flee biosynthesis reaction mixture.

[0072] In some embodiments, the identification peptide is a purification tag. the purification tag is Albumin-binding protein (ABP), Alkaline Phosphatase (AP), AU1 epitope, AU5 epitope, Bacteriophage 17 epitope (17-tag), Bacteriophage V5 epitope (V5 tag), Biotin-carboxy carrier protein (BCCP), Bluetongue virus tag (B tag), Calmodulin binding peptide (CBP), Chloramphenicol Acetyl Transferase (CAT), Cellulose binding domain (CBD), Chitin binding domain (CBD), Choline-binding domain (CBD), Dihydrofolate reductase (DHFR), E2 epitope, FLAG epitope, Galactose-binding protein (GBP), Green fluorescent protein (GFP), Glu-Glu (EE-tag), Glutathione-S-transferase (GST), Human influenza hemagglutinin (HA), HaloTag®, Histidine affinity tag (HAT), Horseradish peroxidase (HRP), HSV epitope, Ketosteroid isomerase (KSI), KT3 epitope, LacZ, Luciferase, Maltose-binding protein (MBP), Myc epitope, NusA, PDZ ligand, Polyarginine (Arg-tag), Polyaspartate (Asp-tag), Polycysteine (Cys-tag), Polyhistidine (His-tag), Polyphenylalanine (Poly-tag), Profinity eXact™, Protein C, S1 tag, S-tag, Streptavidin-binding peptide (SBP), Staphylococcal protein A (Protein A), Staphylococcal protein G (Protein G), Strep-tag, Streptavidin, Small Ubiquitin-like Modifier (SUMO), Tandem Affinity Purification (TAP), T7 epitope, Thioredoxin (Trx), TrpE, Ubiquitin, Universal, VSV-G. In some embodiments, the first fusion protein further comprises a linker between the first protein and the lasso peptide component. In some embodiments, the liner is a cleavable linker.

[0073] In one aspect, provided herein is a system comprising a bacteriophage devoid of a first nonessential outer capsid protein, and a first fusion protein comprising a lasso peptide component fused to the first nonessential outer capsid protein of the bacteriophage. In some embodiments, the bacteriophage is devoid of a second nonessential outer capsid protein, and wherein the system further comprises a second fusion protein comprising an identification peptide fused to the second nonessential outer capsid protein of the bacteriophage.

[0074] In some embodiments, the bacteriophage comprises a mutated genome having one or more endogenous sequence encoding the first and/or second nonessential outer capsid protein(s) of the bacteriophage deleted. In some embodiments, the mutated genome further comprising an exogenous sequence encoding the first and/or second fusion protein.

[0075] In some embodiments, the bacteriophage is a non-naturally occurring T4 phage, T7 phage or λ (lambda) phage. In some embodiments, the bacteriophage is a non-naturally occurring T4 phage, and wherein the first nonessential outer capsid protein is HOC and the second nonessential outer capsid protein is SOC. In some embodiments, the lasso peptide component is a lasso precursor peptide, a lasso core peptide, a lasso peptide or a functional fragment of lasso peptide.

[0076] In some embodiments, the system further comprises at least one lasso peptide biosynthesis component. In some embodiments, the bacteriophage, the first and/or second fusion protein(s), and/or the at least one lasso peptide biosynthesis component is in a cytoplasm of the host microbial cell. In some embodiments, the bacteriophage, the first and/or second fusion protein(s), and/or the at least one lasso peptide biosynthesis component is in a cell-free biosynthesis reaction mixture. In some embodiments, the bacteriophage, the first and/or second fusion protein(s), and/or the at least one lasso peptide biosynthesis component is purified.

[0077] In some embodiments, the further comprises a solid support having at least one unique location, wherein the bacteriophage, the first and/or second fusion protein(s), and/or the at least one lasso peptide biosynthesis component is located at the unique location.

[0078] In some embodiments, the lasso precursor peptide comprises a sequence of any one of the even numbers of SEQ ID NOS:1-2630, or a sequence having greater than 30% identity of any one of the even numbers of SEQ ID NOS:1-2630.

[0079] In some embodiments, the at least one lasso peptide biosynthesis component comprises one or more of a lasso peptidase, a lasso cyclase and a lasso RRE. In some embodiments, the lasso peptidase comprises a sequence of any one of peptide Nos: 1316-2336, or a sequence having greater than 30% identity of any one of peptide Nos: 1316-2336. In some embodiments, the lasso cyclase comprises a sequence of any one of peptide Nos: 2337-3761, or a sequence having greater than 30% identity of any one of peptide Nos: 2337-3761. In some embodiments, the lasso RRE comprises a sequence of any one of peptide Nos: 3762-4593, or a sequence having greater than 30% identity of any one of peptide Nos: 3762-4593.

[0080] In some embodiments, the at least one lasso peptide biosynthesis component comprises a fusion protein comprising a lasso peptidase and a lasso cyclase. In some embodiments, the at least one lasso peptide biosynthesis component comprises a fusion protein comprising a lasso peptidase and a lasso RRE.

[0081] In some embodiments, the fusion protein comprising the lasso peptidase and the lasso RRE comprises a sequence of any one of peptide Nos: 3768, 3770, 3793, 3811, 3818, 3851, 3855, 3887, 4004, 4018, 4045, 4076, 4132, 4150, 4167, 4168, 4225, 4262, 4379, 4414, 4499, 4504, 4507, 4512, 4517, 4518, 4529, 4532, 4542, 4559, 4561, 4562, or a sequence having greater than 30% identity of any one of peptide Nos: 3768, 3770, 3793, 3811, 3818, 3851, 3855, 3887, 4004, 4018, 4045, 4076, 4132, 4150, 4167, 4168, 4225, 4262, 4379, 4414, 4499, 4504, 4507, 4512, 4517, 4518, 4529, 4532, 4542, 4559, 4561, 4562.

[0082] In some embodiments, the at least one lasso peptide biosynthesis component comprises a fusion protein comprising a lasso cyclase and a lasso RRE. In some embodiments, the fusion protein comprising the lasso cyclase and the lasso RRE comprises a sequence selected from peptide Nos: 2504, 3608 or a sequence having greater than 30% identity of any one of peptide Nos: 2504 and 3608.

[0083] In some embodiments, the at least one lasso peptide biosynthesis component comprises a fusion protein comprising a lasso peptidase and a lasso cyclase. In some embodiments, the fusion protein comprising the lasso peptidase and the lasso cyclase comprises a sequence having peptide No: 2903 or a sequence having greater than 30% identity thereof.

[0084] In some embodiments, the at least one lasso peptide biosynthesis component comprises a fusion protein comprising a lasso peptidase, a lasso cyclase, and a lasso RRE.

[0085] In some embodiments, the host microbial cell is a bacterial cell or an archaeal cell. In some embodiments, the host microbial cell is E. coli.

[0086] In some embodiments, the identification peptide is a purification tag. In some embodiments, the system further comprises a solid support having at least one unique location. In some embodiments, the purification tag is Albumin-binding protein (ABP), Alkaline Phosphatase (AP), AU1 epitope, AU5 epitope, Bacteriophage 17 epitope (17-tag), Bacteriophage V5 epitope (V5 tag), Biotin-carboxy carrier protein (BCCP), Bluetongue virus tag (B tag), Calmodulin binding peptide (CBP), Chloramphenicol Acetyl Transferase (CAT), Cellulose binding domain (CBD), Chitin binding domain (CBD), Choline-binding domain (CBD), Dihydrofolate reductase (DHFR), E2 epitope, FLAG epitope, Galactose-binding protein (GBP), Green fluorescent protein (GFP), Glu-Glu (EE-tag), Glutathione-S-transferase (GST), Human influenza hemagglutinin (HA), HaloTag®, Histidine affinity tag (HAT), Horseradish peroxidase (HRP), HSV epitope, Ketosteroid isomerase (KSI), KT3 epitope, LacZ, Luciferase, Maltose-binding protein (MBP), Myc epitope, NusA, PDZ ligand, Polyarginine (Arg-tag), Polyaspartate (Asp-tag), Polycysteine (Cys-tag), Polyhistidine (His-tag), Polyphenylalanine (Poly-tag), Profinity eXact™, Protein C, S1 tag, S-tag, Streptavidin-binding peptide (SBP), Staphylococcal protein A (Protein A), Staphylococcal protein G (Protein G), Strep-tag, Streptavidin, Small Ubiquitin-like Modifier (SUMO), Tandem Affinity Purification (TAP), T7 epitope, Thioredoxin (Trx), TrpE, Ubiquitin, Universal, VSV-G.

[0087] In some embodiments, the first fusion protein further comprises a linker between the first protein and the lasso peptide component. In some embodiments, the liner is a cleavable linker.

[0088] In one aspect, provided herein are non-naturally occurring bacteriophages. In some embodiments, the bacteriophage comprising a genome and a capsid, wherein the capsid comprises a plurality of a first coat proteins, and wherein at least one of the first coat proteins is fused to a lasso peptide component in a first fusion protein. In some embodiments, the phage further comprises a plurality of a second coat protein, and wherein at least one of the second coat protein is fused to an identification peptide in a second fusion protein.

[0089] In some embodiments, the genome is devoid of one or more endogenous sequence encoding the first and/or second coat protein(s). In some embodiments, the genome further comprises an exogenous sequence encoding the first and/or second fusion protein. In some embodiments, the genome is a wild-type genome. In some embodiments, at least one first coat protein is wild-type.

[0090] In some embodiments, at least one second coat protein is wild-type. In some embodiments, the genome is wild-type, and wherein the capsid comprises at least one first coat protein in the first fusion protein, and at least one first coat protein that is wild-type. In some embodiments, the capsid further comprises at least one second coat protein in the second fusion protein, and at least one second coat protein that is wild-type.

[0091] In some embodiments, the genome is devoid of an endogenous sequence coding for the first coat protein, and wherein the capsid comprises at least one first coat protein in the first fusion protein. In some embodiments, the genome further comprises an exogenous sequence encoding the first fusion protein. In some embodiments, the capsid further comprises at least one first coat protein that is wild-type. In some embodiments, the genome is further devoid of an endogenous sequence coding for the second coat protein, and wherein the capsid comprises at least one second coat protein in the second fusion protein. In some embodiments, the capsid further comprises at least one second coat protein that is wild-type. In some embodiments, the first coat protein is a nonessential outer capsid protein. In some embodiments, the second coat protein is a nonessential outer capsid protein.

[0092] In some embodiments, the bacteriophage is a non-naturally occurring T4 phage, T7 phage or a λ (lambda) phage. In some embodiments, the bacteriophage is a non-naturally occurring T4 phage, and wherein the first coat protein is HOC and the second coat protein is SOC. In some embodiments, the bacteriophage is capable of infection of a host microbial cell. In some embodiments, the host microbial organism is a bacterial cell or an archaea cell. In some embodiments, the host microbial organism is E. coli.

[0093] In some embodiments, the lasso peptide component is a lasso precursor peptide, a lasso core peptide, a lasso peptide or a functional fragment of lasso peptide. In some embodiments, the lasso precursor peptide comprises a sequence of any one of the even numbers of SEQ ID NOS:1-2630, or a sequence having greater than 30% identity of any one of the even numbers of SEQ ID NOS:1-2630.

[0094] In some embodiments, the bacteriophages as described herein are included in a library, wherein the first fusion proteins in the distinct members comprise distinct lasso peptide components. In some embodiments, the library further comprises a solid support comprising a plurality of unique locations, wherein each unique location contains a distinct member.

[0095] In one aspect, provided herein are methods for making a member of a bacteriophage display library. In some embodiments, the method comprises providing a system comprising (i) a first nucleic acid sequence encoding one or more structural proteins of a bacteriophage; (ii) a second nucleic acid sequence encoding a first fusion protein comprising a lasso peptide component fused to a first coat protein of the bacteriophage; and (iii) a third nucleic acid sequence encoding at least one lasso peptide biosynthesis component; introducing the system into a population of microbial cells or a cell-flee biosynthesis reaction mixture; incubating the population of microbial cells or the cell-flee biosynthesis reaction mixture under a suitable condition to produce a plurality of bacteriophages each displaying the lasso peptide component on the first coat protein; and wherein the lasso peptide biosynthesis component processes the lasso peptide component into a lasso peptide or a functional fragment of lasso peptide.

[0096] In some embodiments of the method, the first nucleic acid sequence comprises a mutated genome of the bacteriophage devoid of an endogenous sequence encoding the first coat protein. In some embodiments, the first nucleic acid sequence and the second nucleic acid sequence are in the same nucleic acid molecule. In some embodiments, the first, second and third nucleic acid sequences are in the same nucleic acid molecule. In some embodiments, the first nucleic acid sequence and the second nucleic acid sequence in different nucleic acid molecules that are configured to undergo homologous recombination to produce a recombinant sequence encoding the structural proteins and the first fusion protein. In some embodiments, the step of introducing the system into the population of microbial cells comprises infecting the population of microbial cells with a bacteriophage having a mutated genome comprising the first nucleic acid. In some embodiments, the step of introducing the system into the population of microbial cells comprises transfecting the population of microbial cells with one or more vectors comprising the second and/or third nucleic acid sequence.

[0097] In some embodiments of the method, the first nucleic acid comprises a mutated genome of the bacteriophage devoid of an endogenous sequence encoding a second coat protein of the bacteriophage, wherein the second nucleic acid sequence further encodes a second fusion protein comprising an identification peptide fused to the second coat protein; and wherein the step of incubating comprises incubating the population of microbial cells or cell-free biosynthesis reaction mixture under a suitable condition to produce a plurality of bacteriophages each displaying the lasso peptide component on the first coat protein and the identification peptide on the second coat protein.

[0098] In some embodiments, the method further comprises identifying the lasso peptide component based on the identification peptide. In some embodiments, the identification peptide is a purification tag, and the method further comprises purifying the produced plurality of bacteriophages.

[0099] In some embodiments of the methods, the first nucleic acid sequence comprises a wild-type genome of the bacteriophage. In some embodiments, the one or more structural proteins encoded by the first nucleic acid sequence comprises wild-type first coat protein. In some embodiments, the first and second nucleic acid sequences are in the same nucleic acid molecule.

[0100] In some embodiments of the method, the one or more structural proteins encoded by the first nucleic acid sequence further comprises a wild-type second coat protein; wherein the second nucleic acid sequence further encodes a second fusion protein comprising an identification peptide fused to the second coat protein; and wherein the step of incubating comprises incubating the population of microbial cells or cell-free biosynthesis reaction mixture under a suitable condition to produce a plurality of bacteriophages each comprising the wild-type second coat protein and the second fusion protein.

[0101] In some embodiments, the method further comprises identifying the lasso peptide component based on the identification peptide. In some embodiments, the identification peptide is a purification tag, and the method further comprises purifying the produced plurality of bacteriophages. In some embodiments, the first, second and third nucleic acid sequences are in the same nucleic acid molecule. In some embodiments, the nucleic acid molecule comprises a mutated genome of the bacteriophage. In some embodiments, the step of incubating is performed at a unique location configured to identify the lasso peptide component.

[0102] In some embodiments, the method further comprises identifying the lasso peptide component based on the unique location. In some embodiments, the bacteriophage is a non-naturally occurring T4 page, T7 phage or λ (lambda) phage. In some embodiments, the bacteriophage is a non-naturally occurring T4 page, and wherein the first coat protein is HOC and the second coat protein is SOC.

[0103] In one aspect, provided herein are methods for making a member of a bacteriophage display library. In some embodiments, the method comprises contacting a first bacteriophage devoid of a first nonessential outer capsid protein with a first fusion protein comprising a lasso peptide component fused to the first nonessential outer capsid protein of the bacteriophage under a suitable condition to produce a second bacteriophage displaying the lasso peptide component on the first coat protein.

[0104] In some embodiments of the methods, the first bacteriophage is further devoid of a second nonessential outer capsid protein, and wherein the method further comprises contacting the second bacteriophage with a second fusion protein comprising an identification peptide fused with the second nonessential outer capsid protein under a suitable condition to produce a third bacteriophage displaying the lasso peptide component on the first coat protein and the identification peptide on the second coat protein.

[0105] In some embodiments, the method further comprises contacting the second or the third bacteriophage with at least one lasso peptide biosynthesis component under a suitable condition to process the lasso peptide component into a lasso peptide or a functional fragment of lasso peptide. In some embodiments, the first bacteriophage comprises a mutated genome devoid of an endogenous sequence encoding the first nonessential outer capsid protein. In some embodiments, the first bacteriophage comprises a mutated genome devoid of an endogenous sequence encoding the second nonessential outer capsid protein. In some embodiments, the first bacteriophage comprises a mutated genome comprising an exogenous sequence encoding the first fusion protein. In some embodiments, the first bacteriophage comprises a mutated genome comprising an exogenous sequence encoding the second fusion protein. In some embodiments, the first bacteriophage comprises a wild-type genome of the bacteriophage. In some embodiments, the second or third bacteriophage is a non-naturally existing T4 phage, T7 phage or (lambda) phage. In some embodiments, the second or third bacteriophage is a non-naturally existing T4 phage, and wherein the first nonessential outer capsid protein is HOC, and the second nonessential outer capsid protein is SOC.

### 4. BRIEF DESCRIPTION OF THE FIGURES

[0106] The details of one or more embodiments of the present disclosure are set forth in the accompanying drawings and the description below. Other features, objects, and benefits of the present disclosure will be apparent from the description and drawings, and from the claims. All publications, patents and patent applications cited herein are hereby expressly incorporated by reference for all purposes.

[0107] The embodiments of the description described herein are not intended to be exhaustive or to limit the disclosure to the precise forms disclosed in the following drawings or detailed description. Rather, the embodiments are chosen and described so that others skilled in the art can appreciate and understand the principles and practices of the description.

[0108] FIG. 1 is a schematic illustration of the conversion of a lasso precursor peptide into a lasso peptide having the general structure 1 with the lariat-like topology.

[0109] FIG. 2 is a schematic illustration of a 26-mer linear core peptide corresponding to a lasso peptide.

[0110] FIG. 3 shows an exemplary system and process for producing a budding phage displaying a lasso peptide where the lasso formation occurs in the periplasmic space of the host cell of the phage.

[0111] FIG. 4 shows an exemplary system and process for producing a budding phage displaying a lasso peptide where the lasso formation occurs extracellularly to the host cell of the phage.

[0112] FIG. 5 shows an exemplary system and process for producing a budding phage displaying a lasso peptide where the lasso formation is catalyzed by contacting matured phage with purified lasso processing enzymes.

[0113] FIG. 6 shows exemplary methods for generation of a lytic phage particle displaying a lasso peptide, including genetic engineering of the lytic phage genome, or competitive assembly of T4 phage particles without genome editing.

[0114] FIG. 7 shows an exemplary system and method for producing lytic phage particles displaying a lasso peptide and a purification tag, where the phage assembly and lasso formation occurs in the cytoplasm of a host cell of the phage.

[0115] FIG. 8 shows an exemplary system and method for producing phage particles displaying a lasso peptide and a purification tag, where the phage assembly and lasso formation occurs in vitro in a cell-free system.

[0116] FIG. 9 shows an exemplary system and method for assembly fusion proteins containing a lasso peptide or a purification tag onto the capsid of a mutant T4 phage.

[0117] FIG. 10 shows exemplary methods for in vitro maturation of lasso peptide displayed on a mutant phage particle. Particularly, purified lasso peptide biosynthesis components are incubated with phage particles displaying a lasso precursor peptide under a condition suitable for lasso formation.

[0118] FIG. 11A and FIG. 11B show exemplary methods and systems for competitive assembly of T4 phage particles displaying a lasso peptide and a purification tag.

### 5. DETAILED DESCRIPTION

[0119] The features of the present disclosure are set forth specifically in the appended claims. A better understanding of the features and benefits of the present disclosure will be obtained by reference to the following detailed description that sets forth illustrative embodiments, in which the principles of the disclosure are utilized. To facilitate a full understanding of the disclosure set forth herein, a number of terms are defined below.

### 5.1 General Techniques

[0120] Techniques and procedures described or referenced herein include those that are generally well understood and/or commonly employed using conventional methodology by those skilled in the art, such as, for example, the widely utilized methodologies described in Sambrook et al., Molecular Cloning: A Laboratory Manual (4th ed. 2012); Current Protocols in Molecular Biology (Ausubel et al. eds., 2003); Therapeutic Monoclonal Antibodies: From Bench to Clinic (An ed. 2009); Monoclonal Antibodies: Methods and Protocols (Albitar ed. 2010); and Antibody Engineering Vols 1 and 2 (Kontermann and Dübel eds., 2nd ed. 2010). Molecular Biology of the Cell (6th Ed., 2014). Organic Chemistry, (Thomas Sorrell, 1999). March's Advanced Organic Chemistry (6^{th} ed. 2007). Lasso Peptides, (Li, Y.; Zirah, S.; Rebnffet, S., Springer; New York, 2015). Phage display—a powerful technique for immunotherapy (Bazan et al., Hum Vaccin Immunother. 2012, 8(12):1817-28) Engineering M13 for phage display (Sidhu S S., Biomol Eng. 2001, 18(2):57-63). T4 bacteriophage as a phage display platform (Gamkrelidze M. and Da̧browska K., Arch Microbiol. 2014, 196(7):473-9). Display of peptides and proteins on the surface of bacteriophage lambda (Sternberg N. and Hoess R H., Proc Natl Acad Sci USA. 1995, 92(5):1609-13); Phage Display in Biotechnology and Drug Discovery, 2^{nd} Ed., (Sidhu, S. S., Geyer, C. R. eds., CRC Press, New York, 2017).

### 5.2 Terminology

[0121] Unless described otherwise, all technical and scientific terms used herein have the same meaning as is commonly understood by one of ordinary skill in the art. For purposes of interpreting this specification, the following description of terms will apply and whenever appropriate, terms used in the singular will also include the plural and vice versa. All patents, applications, published applications, and other publications are incorporated by reference in their entirety. In the event that any description of terms set forth conflicts with any document incorporated herein by reference, the description of term set forth below shall control.

[0122] Generally, the nomenclature used herein and the laboratory procedures in organic chemistry, medicinal chemistry, molecular biology, microbiology, biochemistry, enzymology, computational biology, computational chemistry, and pharmacology described herein are those well-known and commonly employed in the art. Unless defined otherwise, all technical and scientific terms used herein generally have the same meaning as commonly understood by one of ordinary skill in the art to which this disclosure belongs. Methods and compounds of the present disclosure include those described generally above, and are further illustrated by the classes, subclasses, and species disclosed herein. As used herein, the following definitions shall apply unless otherwise indicated. For purposes of the present disclosure, the chemical elements are identified in accordance with the Periodic Table of the Elements, CAS version, Handbook of Chemistry and Physics, 75^{th} Ed. General methods and principles of molecular biology and cloning are described in “Molecular Cloning: A Laboratory Manual”, 4^{th} edition, Michael R Green and Joseph Sambrook, Cold Spring Harbor Laboratory Press, 2012 and “Molecular Biology of the Cell”, 6^{th} Ed., Bruce Alberts, Alexander Johnson, Julian Lewis, David Morgan, Martin Raff, Keith Roberts, Peter Walter, Garland Science Press, 2014, the entire contents of which are hereby incorporated by reference. General methods and principles of phage display technology are described in “Phage Display in Biotechnology and Drug Discovery”, 2^{nd} Ed., Sidhu, S. S., Geyer, C. R. eds., CRC Press, New York, 2017, and “Phage Display of Peptides and Protein: A Laboratory Manual”, Kay, B. K. Winter, J., and McCafferty, J., Academic Press, New York, 1996. Additionally, general principles of organic chemistry are described in “Organic Chemistry”, Thomas Sorrell, University Science Books, Sausalito: 1999, and “March's Advanced Organic Chemistry”, 6^{th}Ed., Ed.: Smith, M. B. and March, J., John Wiley & Sons, New York: 2007, the entire contents of which are hereby incorporated by reference.

[0123] As used herein, the singular terms “a,” “an,” and “the” include the plural reference unless the context clearly indicates otherwise.

[0124] The term “about” or “approximately” means an acceptable error for a particular value as determined by one of ordinary skill in the art, which depends in part on how the value is measured or determined. In certain embodiments, the term “about” or “approximately” means within 1, 2, 3, or 4 standard deviations. In certain embodiments, the term “about” or “approximately” means within 50%, 20%, 15%, 10%, 9%, 8%, 7%, 6%, 5%, 4%, 3%, 2%, 1%, 0.5%, or 0.05% of a given value or range.

[0125] As used herein, the term “naturally occurring” or “naturally existing” or “natural” or “native” when used in connection with biological materials such as nucleic acid molecules, polypeptides, bacteriophages, microbial host cells, oligonucleotides, amino acids, polypeptides, peptides, metabolites, small molecule natural products, host cells, and the like, refers to those that are found in or isolated directly from Nature and are not changed or manipulated by humans. The term “wild-type” refers to organisms, cells, genes, biosynthetic gene clusters, enzymes, proteins, oligonucleotides, and the like that are found in Nature and are unchanged relative to these components found in Nature (in the wild).

[0126] As defined herein, the term “natural product” refers to any product, a small molecule, organic compound, or peptide produced by living organisms, e.g., prokaryotes or eukaryotes, found in Nature, and which are produced through natural biosynthetic processes. As defined herein, “natural products” are produced through an organism's secondary metabolism or through biosynthetic pathways that are not essential for survival and not directly involved in cell growth and proliferation.

[0127] As used herein, the terms “non-naturally occurring” or “non-natural” or “unnatural” or “non-native” refer to a material, substance, molecule, cell, bacteriophage, enzyme, protein or peptide that is not known to exist or is not found in Nature or that has been structurally modified and/or synthesized by humans. The terms “non-natural” or “unnatural” or “non-naturally occurring” when used in reference to a microbial organism or microorganism or cell extract or gene or biosynthetic gene cluster of the present disclosure is intended to mean that the microbial organism (e.g., a phage) or derived cell extract or gene or biosynthetic gene cluster has at least one genetic alteration not normally found in a naturally occurring strain or a naturally occurring gene or biosynthetic gene cluster of the referenced species, including wild-type strains of the referenced species. Genetic alterations include, for example, introduction of expressible oligonucleotides or nucleic acids encoding polypeptides, other nucleic acid additions, nucleic acid deletions and/or other functional disruption of the microbial organism's genetic material. Such modifications include, for example, nucleotide changes, additions, or deletions in the genomic coding regions and functional fragments thereof, used for heterologous, homologous or both heterologous and homologous expression of polypeptides. Additional modifications include, for example, nucleotide changes, additions, or deletions in the genomic non-coding and/or regulatory regions in which the modifications alter expression of a gene or operon. Exemplary polypeptides include enzymes, proteins, or peptides within a lasso peptide biosynthetic pathway.

[0128] The terms “oligonucleotide” and “nucleic acid” refer to oligomers of deoxyribonucleotides (e.g., DNA) or ribonucleotides (e.g., RNA) and polymers thereof in either single- or double-stranded form. Unless specifically limited, the term encompasses nucleic acids containing known analogues of natural nucleotides which have similar binding properties as the reference nucleic acid and are metabolized in a manner similar to naturally occurring nucleotides. Unless specifically limited otherwise, the term also refers to oligonucleotide analogs including PNA (peptidonucleic acid), analogs of DNA used in antisense technology (phosphorothioates, phosphoroamidates, and the like). Unless otherwise indicated, a particular nucleic acid sequence also implicitly encompasses conservatively modified variants thereof (including but not limited to, degenerate codon substitutions) and complementary sequences as well as the sequence explicitly indicated. Specifically, degenerate codon substitutions may be achieved by generating sequences in which the third position of one or more selected (or all) codons is substituted with mixed-base and/or deoxyinosine residues (Batzer, M. A., et al., Nucleic Acid Res., 1991, 19, 5081-1585; Ohtsuka, E. et al., J. Biol. Chem., 1985, 260, 2605-2608; and Rossolini, G. M., et al., Mol. Cell. Probes, 1994, 8, 91-98). “Oligonucleotide,” as used herein, refers to short, generally single-stranded, synthetic polynucleotides that are generally, but not necessarily, fewer than about 200 nucleotides in length. The terms “oligonucleotide” and “polynucleotide” are not mutually exclusive. The description above for polynucleotides is equally and fully applicable to oligonucleotides. A cell that produces a lasso peptide of the present disclosure may include a bacterial and archaea host cells into which nucleic acids encoding the lasso peptide component have been introduced. Suitable host cells are disclosed below.

[0129] Unless specified otherwise, the left-hand end of any single-stranded polynucleotide sequence disclosed herein is the 5′ end; the left-hand direction of double-stranded polynucleotide sequences is referred to as the 5′ direction. The direction of 5′ to 3′ addition of nascent RNA transcripts is referred to as the transcription direction; sequence regions on the DNA strand having the same sequence as the RNA transcript that are 5′ to the 5′ end of the RNA transcript are referred to as “upstream sequences”; sequence regions on the DNA strand having the same sequence as the RNA transcript that are 3′ to the 3′ end of the RNA transcript are referred to as “downstream sequences.”

[0130] The term “encoding nucleic acid” or grammatical equivalents thereof as it is used in reference to nucleic acid molecule refers to a nucleic acid molecule in its native state or when manipulated by methods well known to those skilled in the art that can be transcribed to produce mRNA, which is then translated into a polypeptide and/or a fragment thereof. The antisense strand is the complement of such a nucleic acid molecule, and the encoding sequence can be deduced therefrom.

[0131] The term “exogenous” as used herein with respect to a nucleic acid sequence in the genome of a bacteriophage is intended to mean that the referenced nucleic acid sequence is introduced into the phage genome. The molecule can be introduced to the phage genetic material, for example, via phage genetic cross, homologous recombination, DNA recombineering, CRISPR-Cas-mediated genetic engineering, genome fragment ligation, and de novo phage genome assembly (Pires et al., Microbiol Mol Biol Rev. 2016, 80(3):523-43). Such genetic engineering tools have aided the development of several display systems based on, e.g. T4, T7, or lambda (λ) phage for molecular evolution, such as affinity maturation of monoclonal antibodies and receptor ligands (Bazan et al., Hum Vaccin Immunother. 2012, 8(12):1817-28; Szardenings et al., J Biol Chem. 1997, 272(44):27943-8; Jiang et al., Infect Immun. 1997, 65(11):4770-7; Burgoon et al., J Immunol. 2001, 167(10):6009-14; Sternberg N. and Hoess R H., Proc Natl Acad Sci USA. 1995, 92(5):1609-13). Specifically, the term “exogenous” as it is used in reference to expression of an encoding nucleic acid refers to introduction of the encoding nucleic acid in an expressible form into the phage genome. The term “endogenous” as used herein with respect to a nucleic acid sequence in the genome of a bacteriophage is intended to refer to a referenced nucleic acid sequence that is present in the phage genome. Similarly, the term when used in reference to expression of an encoding nucleic acid refers to expression of an encoding nucleic acid contained by the phage genome.

[0132] An “isolated nucleic acid” is a nucleic acid, for example, an RNA, a DNA, or a mixed nucleic acid, which is substantially separated from other genome DNA sequences as well as proteins or complexes such as ribosomes and polymerases, which naturally accompany a native sequence. An “isolated” nucleic acid molecule is one which is separated from other nucleic acid molecules which are present in the natural source of the nucleic acid molecule. Moreover, an “isolated” nucleic acid molecule, such as a cDNA molecule, can be substantially flee of other cellular material, or culture medium when produced by recombinant techniques, or substantially free of chemical precursors or other chemicals when chemically synthesized. In a specific embodiment, one or more nucleic acid molecules encoding an antibody as described herein are isolated or purified. The term embraces nucleic acid sequences that have been removed from their naturally occurring environment, and includes recombinant or cloned DNA isolates and chemically synthesized analogues or analogues biologically synthesized by heterologous systems. A substantially pure molecule may include isolated forms of the molecule.

[0133] As used herein, the term “biosynthetic gene cluster” refers to one or more nucleic acid molecule(s) independently or jointly comprising one or more coding sequences for a precursor and processing machinery capable of maturing the precursor into a biosynthetic end product. The coding sequences can comprise multiple open reading flames (ORFs) each independently coding for one component of the precursor and processing machinery. Alternatively, the coding sequences can comprise an ORF coding for two or more components of the precursor and processing machinery fused together, as further described herein. A biosynthetic gene cluster can be identified and isolated from the genome of an organism. Computer-based analytical tools can be used to mine genomic information and identify biosynthetic gene clusters encoding lasso peptides. For example, the genome-mining tool known as Rapid ORF Description and Evaluation Online (RODEO) has been used to identify more than a thousand of lasso biosynthetic gene clusters based on available genomic information (Tietz et al. Nat Chem Biol. 2017 May; 13(5): 470-478). Alternatively, a biosynthetic gene cluster can be assembled by artificially producing and combining the nucleic acid components of the gene cluster, using genetic manipulating methods and technology known in the art.

[0134] The term “amino acid” refers to naturally occurring and non-naturally occurring alpha-amino acids, as well as alpha-amino acid analogs and amino acid mimetics that function in a manner similar to the naturally occurring alpha-amino acids. Naturally encoded amino acids are the 22 common amino acids (alanine, arginine, asparagine, aspartic acid, cysteine, glutamine, glutamic acid. glycine, histidine, isoleucine, leucine, lysine, methionine, phenylalanine, proline, serine, threonine, tryptophan, tyrosine, valine, pyrrolysine and selenocysteine). Amino acid analogs or derivatives refers to compounds that have the same basic chemical structure as a naturally occurring amino acid, i.e., a carbon that is bound to a hydrogen, a carboxyl group, an amino group, and a side chain R group, such as, homoserine, norleucine, methionine sulfoxide, methionine methyl sulfonium. Such analogs have modified R groups (such as, norleucine) or modified peptide backbones, but retain the same basic chemical structure as a naturally occurring amino acid. Amino acids may be referred to herein by either their commonly known three letter symbols or by the one-letter symbols recommended by the IUPAC-IUB Biochemical Nomenclature Commission. Nucleotides, likewise, may be referred to by their commonly accepted single-letter codes.

[0135] The terms “non-natural amino acid” or “non-proteinogenic amino acid” or “unnatural amino acid” refer to alpha-amino acids that contain different side chains (different R groups) relative to those that appear in the twenty-two common or naturally occurring amino acids listed above. In addition, these terms also can refer to amino acids that are described as having D-stereochemistry, rather than L-stereochemistry of natural amino acids, despite the fact that some amino acids do occur in the D-stereochemical form in Nature (e.g., D-alanine and D-serine). Additional examples of non-natural amino acids are known in the art, such as those found in Hartman et al. PLoS One. 2007 Oct. 3; 2(10):e972; Hartman et al., Proc Natl Acad Sci USA. 2006 Mar. 21; 103(12):4356-61; and Fiacco et al. Chembiochem. 2016 Sep. 2; 17(17):1643-51.

[0136] The terms “polypeptide” and “protein” are used interchangeably herein to refer to a polymer of greater than about fifty (50) amino acid residues. That is, a description directed to a polypeptide applies equally to a description of a protein, and vice versa. The terms apply to naturally occurring amino acid polymers as well as amino acid polymers in which one or more amino acid residues is a non-naturally occurring amino acid, e.g., an amino acid analog. As used herein, the terms encompass amino acid chains of any length, including full length proteins (i.e., antigens), wherein the amino acid residues are linked by covalent peptide bonds.

[0137] The term “peptide” as used herein refers to a polymer chain containing between two and fifty (2-50) amino acid residues. The terms apply to naturally occurring amino acid polymers as well as amino acid polymers in which one or more amino acid residues is a non-naturally occurring amino acid, e.g., an amino acid analog or non-natural amino acid.

[0138] The terms “lasso peptide” and “lasso” are used interchangeably herein, and is used to refer to a class of peptide or polypeptide having the general lariat-like topology as exemplified in FIG. 1. As shown in the figure, the lariat-like topology can be generally divided into a ring portion, a loop portion, and a tail portion. Particularly, a region on one end of the peptide forms the ring around the tail on the other end of the peptide, the tail is threaded through the ring, and a middle loop portion connects the ring and the tail, together forming the lariat-like topology. Particularly, the amino acid residues that are joined together to form the ring are herein referred to as the “ring-forming amino acid.” A ring-forming amino acid can located at the N- or C-terminus of the lasso peptide (“terminal ring-forming amino acid”), or in the middle (but not necessarily the center) of a lasso peptide (“internal ring-forming amino acid”). The fragment of a lasso peptide between and including the two ring-forming amino acid residues is the ring portion; the fragment of a lasso peptide between the internal ring-forming amino acid and where the peptide threaded through the plane of the ring is the loop portion; and the remaining fragment of a lasso peptide starting from where the peptide is threaded through the plane of the ring is the tail portion. In addition to the lariat-like topology, additional topological features of a lasso peptide may further include intra-peptide disulfide bonding, such as disulfide bond(s) between the tail and the ring, between the ring and the loop, and/or between different locations within the tail. As used herein, “lasso peptide” or “lasso” refers to both naturally-existing peptides and artificially produced peptides that have the lariat-like topology as described herein. Similarly, “lasso peptide” or “lasso” also refers to analogs, derivatives, or variants of a lasso peptide, which analogs, derivatives or variants are also lasso peptides themselves.

[0139] The term “lasso precursor peptide” or “precursor peptide” as used herein refers to a precursor that is processed into or otherwise forms a lasso peptide. In some embodiments, a lasso precursor peptide comprises at least one a lasso core peptide portion. In some embodiments, a lasso precursor peptide comprises one or more amino acid residues or amino acid fragments that do not belong to a lasso core peptide, such as a leader sequence that facilitates recognition of the lasso precursor peptide by one or more lasso processing enzymes. In some embodiments, the lasso precursor peptide is enzymatically processed into a lasso peptide by removing the amino acid residues or fragments that do not belong to a lasso core peptide. In some embodiments, a lasso precursor peptide is the substrate of an enzyme that cleaves off the additional amino acid residues or fragments from a lasso precursor peptide to produce the lasso peptide. As used herein, the enzyme capable of catalyzing this reaction is referred to as the “lasso peptidase”.

[0140] The term “lasso core peptide” or “core peptide” refers to the peptide or the peptide segment of the precursor peptide that is processed into or otherwise forms a lasso peptide having the lariat-like topology. As used herein, a core peptide may have the same amino acid sequence as a lasso peptide, but has not matured to have the lariat-like topology of a lasso peptide. In various embodiments, core peptides can have different lengths of amino acid sequences. In some embodiments, the core peptide is at least about 5 amino acid long. In some embodiments, the core peptide is at least about 10 amino acid long. In some embodiments, the core peptide is at least about 11 amino acid long. In some embodiments, the core peptide is at least about 12 amino acid long. In some embodiments, the core peptide is at least about 13 amino acid long. In some embodiments, the core peptide is at least about 14 amino acid long. In some embodiments, the core peptide is at least about 15 amino acid long. In some embodiments, the core peptide is at least about 16 amino acid long. In some embodiments, the core peptide is at least about 17 amino acid long. In some embodiments, the core peptide is at least about 18 amino acid long. In some embodiments, the core peptide is at least about 19 amino acid long. In some embodiments, the core peptide is at least about 20 amino acid long. In some embodiments, the core peptide is at least about 25 amino acid long. In some embodiments, the core peptide is at least about 30 amino acid long. In some embodiments, the core peptide is at least about 35 amino acid long. In some embodiments, the core peptide is at least about 40 amino acid long. In some embodiments, the core peptide is at least about 45 amino acid long. In some embodiments, the core peptide is at least about 50 amino acid long. In some embodiments, the core peptide is at least about 55 amino acid long. In some embodiments, the core peptide is at least about 60 amino acid long. In some embodiments, the core peptide is at least about 65 amino acid long.

[0141] FIG. 2 shows an exemplary 26-mer linear lasso core peptide. Mutational analysis of the lasso precursor peptides McjA of microcin J25 and CapA of capistruin has revealed the high promiscuity of the biosynthetic machineries and the high plasticity of the lasso peptide structure, including the introduction of non-natural amino acids (See: Knappe, T. A., et al., Chem. Biol., 2009, 16, 1290-1298; Pavlova, O., et al. J. Biol. Chem., 2008, 283, 25589-25595; Al Toma, R S., et al., ChemBioChem, 2015, 16, 503-509). In addition, the feasible heterologous production of various variants in bacterial strains such as Escherichia coli and Streptomyces lividans indicates the relative ease of lasso peptide production. (See: Hegemann, J. D., et al., Biopolymers, 2013, 100, 527-542). The C-terminus of some lasso peptides has been shown to provide a source for diversification, for example through the formation of fusion peptides and proteins (See: Zong, C., et al., ACS Chem. Biol., 2016, 11, 61-68). Finally, the unique three-dimensional lariat-like topology of lasso peptides are difficult to achieve during chemical synthesis processes, but can be produced using a biosynthetically processes either in a host organism, or in a cell-flee biosynthesis system, having lasso precursors and lasso peptide biosynthetic enzymes.

[0142] Some naturally existing lasso peptides are encoded by a lasso peptide biosynthetic gene cluster, which typically comprises three main genes: one encodes for a lasso precursor peptide (referred to as Gene A), and two encode for processing enzymes including a lasso peptidase (referred to as Gene B) and a lasso cyclase (referred to as Gene C). The lasso precursor peptide comprises a lasso core peptide and additional peptidic fragments known as the “leader sequence” that facilitates recognition and processing by the processing enzymes. The leader sequence may determine substrate specificity of the processing enzymes. The processing enzymes encoded by the lasso peptide gene cluster convert the lasso precursor peptide into a matured lasso peptide having the lariat-like topology. Particularly, the lasso peptidase removes from the precursor peptide the additional portion that is not the lasso core peptide, and the lasso cyclase cyclize a terminal portion of the core peptide around a terminal tail portion to form the lariat-like topology.

[0143] Some lasso gene clusters further encodes for additional protein elements that facilitates the post-translational modification, including a facilitator protein known as the post-translationally modified peptide (RiPP) recognition element (RRE). A lasso peptide biosynthetic gene clusters may encode two or more of lasso peptidase, lasso cyclase and RRE as different domains in the same protein. Some lasso gene clusters further encodes for lasso peptide transporters, kinases, or proteins that play a role in immunity, such as isopeptidase. (Burkhart, B. J., et al., Nat. Chem. Biol., 2015, 11, 564-570; Knappe, T. A. et al., J. Am. Chem. Soc., 2008, 130, 11446-11454; Solbiati, J. O. et al. J. Bacteriol., 1999, 181, 2659-2662; Fage, C. D., et al., Angew. Chem. Int. Ed., 2016, 55, 12717-12721; Zhu, S., et al., J. Biol. Chem. 2016, 291, 13662-13678).

[0144] As used herein, the term “lasso peptide component” refers to a protein comprising (i) a lasso peptide, (ii) a functional fragment of a lasso peptide, (iii) a lasso precursor peptide, or (iv) a lasso core peptide. As used herein, the term “lasso peptide biosynthesis component” refer to a protein comprising one or more of (i) a lasso peptidase, (ii) a lasso cyclase, and (iii) RRE.

[0145] Artificially produced lasso peptides may or may not be the same as a naturally-existing lasso peptide. For example, some artificially produced lasso peptides are non-naturally occurring lasso peptides. Some artificially produced lasso peptides can have a unique amino acid sequence and/or structure (e.g. lariat-like topology) that is different from those of any naturally-existing lasso peptide. Some artificially produced lasso peptides are analogs or derivatives of naturally-existing lasso peptides.

[0146] The terms “analog” and “derivative” are used interchangeably to refer to a molecule such as a lasso peptide, that have been modified in some fashion, through chemical or biological means, to produce a new molecule that is similar but not identical to the original molecule. For example, analogs or derivatives of a naturally-existing lasso peptide include a peptide or polypeptide that comprises an amino acid sequence of the naturally-existing lasso peptide, which has been altered by the introduction of amino acid residue substitutions, deletions, or additions. Analogs or derivatives of a naturally-existing lasso peptide also include a lasso peptide which has been chemically modified, e.g., by the covalent attachment of any type of molecule to the polypeptide. For example, but not by way of limitation, a lasso peptide may be chemically modified, e.g., by increase or decrease of glycosylation, acetylation, pegylation, phosphorylation, amidation, derivatization by known protecting/blocking groups, proteolytic cleavage, chemical cleavage, linkage to a cellular ligand or other protein, etc. The derivatives are modified in a manner that is different from naturally occurring or starting peptide or polypeptides, either in the type or location of the molecules attached. Derivatives further include deletion of one or more chemical groups which are naturally present on the peptide or polypeptide. Further, a derivative of a lasso peptide, or a fragment of a lasso peptide may contain one or more non-classical or non-natural amino acids. A peptide or polypeptide derivative possesses a similar or identical function as a lasso peptide or a fragment of a lasso peptide. Analogs or derivatives also include a lasso peptide created by modifying the position of the ring-foaming nucleic acid residue in a lasso peptide sequence, while the remaining portions of the sequence unchanged. As used herein, an analog or derivative of a lasso peptide may but not necessarily have a similar amino acid sequence as the original lasso peptide. A peptide or polypeptide that has a similar amino acid sequence refers to a peptide or polypeptide that satisfies at least one of the followings: (a) a polypeptide having an amino acid sequence that is at least 30%, at least 35%, at least 40%, at least 45%, at least 50%, at least 55%, at least 60%, at least 65%, at least 70%, at least 75%, at least 80%, at least 85%, at least 90%, at least 95%, or at least 99% identical to the amino acid sequence of a lasso peptide or a fragment of a lasso peptide; (b) a peptide of polypeptide encoded by a nucleotide sequence that hybridizes under stringent conditions to a nucleotide sequence encoding a lasso peptide or a fragment of a lasso peptide described herein of at least 5 amino acid residues, at least 10 amino acid residues, at least 15 amino acid residues, at least 20 amino acid residues, at least 25 amino acid residues, at least 30 amino acid residues, at least 40 amino acid residues, at least 50 amino acid residues, at least 60 amino residues, at least 70 amino acid residues, at least 80 amino acid residues, at least 90 amino acid residues, at least 100 amino acid residues, at least 125 amino acid residues, or at least 150 amino acid residues (see, e.g., Sambrook et al., Molecular Cloning: A Laboratory Manual (2001); and Maniatis et al., Molecular Cloning: A Laboratory Manual (1982)); or (c) a peptide or polypeptide encoded by a nucleotide sequence that is at least 30%, at least 35%, at least 40%, at least 45%, at least 50%, at least 55%, at least 60%, at least 65%, at least 70%, at least 75%, at least 80%, at least 85%, at least 90%, at least 95%, or at least 99% identical to the nucleotide sequence encoding a lasso peptide or a fragment of a lasso peptide. A peptide or polypeptide with similar structure to a lasso peptide or a fragment of a lasso peptide refers to a peptide or polypeptide that has a similar secondary, tertiary, or quaternary structure of a lasso peptide or a fragment of a lasso peptide. The structure of a peptide or polypeptide can be determined by methods known to those skilled in the art, including but not limited to, X-ray crystallography, nuclear magnetic resonance, and crystallographic electron microscopy.

[0147] The term “variant” as used herein refers to a peptide or polypeptide comprising one or more (such as, for example, about 1 to about 25, about 1 to about 20, about 1 to about 15, about 1 to about 10, about 1 to about 5, or about 1 to about 3) amino acid sequence substitution, deletions, and/or additions as compared to a native or unmodified sequence. For example, a lasso peptide variant may result from one or more (such as, for example, about 1 to about 25, about 1 to about 20, about 1 to about 15, about 1 to about 10, about 1 to about 5, or about 1 to about 3) changes to an amino acid sequence of the native counterpart. Similarly, a phage protein variant may result from one or more (such as, for example, about 1 to about 25, about 1 to about 20, about 1 to about 15, about 1 to about 10, about 1 to about 5, or about 1 to about 3) changes to an amino acid sequence of the native counterpart.

[0148] Variants may be naturally occurring, such as allelic or splice variants, or may be artificially constructed. Polypeptide variants may be prepared from the corresponding nucleic acid molecules encoding the variants. In specific embodiments, the lasso peptide variant at least retains functionality of the native lasso peptide. For example, a variant of an antagonist lasso peptide. In specific embodiments, a lasso peptide variant binds to a target molecule and/or is antagonistic to the target molecule activity. In specific embodiments, a lasso peptide variant binds a target molecule and/or is agonistic to the target molecule activity. In certain embodiments, the variant is encoded by a single nucleotide polymorphism (SNP) variant of a nucleic acid molecule that encodes a lasso peptide, regions or sub-regions thereof, such as the ring, loop and/or tail portions of the lasso core peptide. In certain embodiments, variants of lasso peptides can be generated by modifying a lasso peptide, for example, by (i) introducing an amino acid sequence substitution or mutation, including the introduction of an unnatural or unusual amino acid, (ii) creating fragment of a lasso peptide; (iii) creating a fusion protein comprising one or more lasso peptides or fragment(s) of lasso peptides, and/or other non-lasso proteins or peptides, (iv) introducing chemical or biological transformation of the chemical functionality present in naturally-existing lasso peptides (e.g., inducing acylation, biotinylation, O-methylation, N-methylation, amidation, etc.), (v) making isotopic variants of naturally-existing lasso peptides, or any combinations of (i) to (v). For example, in one embodiment, one or more target-binding motif is introduced into a lasso peptide to provide a lasso peptide that specifically binds to a target molecule. For example, in some embodiments, a tripeptide Arg-Gly-Asp consists of Arginine, Glycine and Aspartate residues is introduced into a lasso peptide to create a lasso peptide variant that binds to a target integrin receptor. Artificially produced lasso peptides can be recombinantly produced using, for example, in vitro or in vivo recombinant expression systems, or synthetically produced.

[0149] The term “isotopic variant” when used in relation to a lasso peptide, refers to lasso peptides that contains an unnatural proportion of an isotope at one or more of the atoms that constitute such a peptide. In certain embodiments, an “isotopic variant” of a lasso peptide contains unnatural proportions of one or more isotopes, including, but not limited to, hydrogen (¹H), deuterium (²H), tritium (³H), carbon-11 (¹¹C), carbon-12 (¹²C) carbon-13 (¹³C), carbon-14 (¹⁴C), nitrogen-13 (¹³N) nitrogen-14 (¹⁴N), nitrogen-15 (¹⁵N), oxygen-14 (¹⁴O), oxygen-15 (¹⁵O), oxygen-16 (¹⁶O), oxygen-17 (¹⁷O), oxygen-18 (¹⁸O) fluorine-17 (¹⁷F), fluorine-18 (¹⁸F), phosphorus-31 (³¹P), phosphorus-32 (³²P), phosphorus-33 (³³P), sulfur-32 (³²S), sulfur-33 (³³S), sulfur-34 (³⁴S), sulfur-35 (³⁵S), sulfur-36 (³⁶S), chlorine-35 (³⁵Cl), chlorine-36 (³⁶Cl), chlorine-37 (³⁷Cl), bromine-79 (⁷⁹Br), bromine-81 (⁸¹Br), iodine-123 (¹²³I) iodine-125 (¹²⁵I) iodine-127 (¹²⁷I) iodine-129 (¹²⁹I) and iodine-131 (¹³¹I) In certain embodiments, an “isotopic variant” of a lasso peptide is in a stable form, that is, non-radioactive. In certain embodiments, an “isotopic variant” of a lasso peptide contains unnatural proportions of one or more isotopes, including, but not limited to, hydrogen (¹H) deuterium (²H), carbon-12 (¹²C), carbon-13 (¹³C), nitrogen-14 (¹⁴N), nitrogen-15 (¹⁵N), oxygen-16 (¹⁶O) oxygen-17 (¹⁷O), oxygen-18 (¹⁸O) fluorine-17 (¹⁷F), phosphorus-31 (³¹P), sulfur-32 (³²S), sulfur-33 (³³S), sulfur-34 (³⁴S), sulfur-36 (³⁶S), chlorine-35 (³⁵Cl), chlorine-37 (³⁷Cl), bromine-79 (⁷⁹Br), bromine-81 (⁸¹Br), and iodine-127 (¹²⁷I). In certain embodiments, an “isotopic variant” of a lasso peptide is in an unstable form, that is, radioactive. In certain embodiments, an “isotopic variant” of a compound contains unnatural proportions of one or more isotopes, including, but not limited to, tritium (³H), carbon-11 (¹¹C), carbon-14 (¹⁴C), nitrogen-13 (¹³N), oxygen-14 (¹⁴O), oxygen-15 (¹⁵O), fluorine-18 (¹⁸F), phosphorus-32 (³²P), phosphorus-33 (³³P) sulfur-35 (³⁵S), chlorine-36 (³⁶Cl), iodine-123 (¹²³I) iodine-125 (¹²⁵I), iodine-129 (¹²⁹I) and iodine-131 (¹³¹I). It will be understood that, in a lasso peptide as provided herein, any hydrogen can be ²H, as example, or any carbon can be ¹³C, as example, or any nitrogen can be ¹⁵N, as example, and any oxygen can be ¹⁸O, as example, where feasible according to the judgment of one of skill in the art. In certain embodiments, an “isotopic variant” of a lasso peptide contains an unnatural proportion of deuterium. Unless otherwise stated, structures depicted herein are also meant to include lasso peptides that differ only in the presence of one or more isotopically enriched atoms from their naturally-existing counterparts. For example, lasso peptides having the present structures including the replacement of hydrogen by deuterium or tritium, or the replacement of a carbon by a ¹³C- or ¹⁴C-enriched carbon are within the scope of the present disclosure. Such lasso peptides are useful, for example, as analytical tools, as probes in biological assays, or as therapeutic agents in accordance with the present disclosure.

[0150] An “isolated” peptide or polypeptide (e.g., lasso peptide or a lasso processing enzyme) is substantially free of cellular material or other contaminating proteins from the cell or tissue source and/or other contaminant components from which the peptide or polypeptide is derived (such as culture medium of the host organism), or substantially free of chemical precursors or other chemicals when chemically synthesized. The language “substantially free” of cellular material or other contaminant components includes preparations of a peptide or polypeptide in which the peptide or polypeptide is separated from components of the cells from which it is isolated, recombinantly produced or biosynthesized. Thus, a peptide or polypeptide that is substantially free of cellular material includes preparations of lasso peptide having less than about 30%, 25%, 20%, 15%, 10%, 5%, or 1% (by dry weight) of heterologous protein (also referred to herein as a “contaminating protein”). In certain embodiments, when the peptide or polypeptide is recombinantly produced, it is substantially flee of culture medium, e.g., culture medium represents less than about 20%, 15%, 10%, 5%, or 1% of the volume of the protein preparation. In certain embodiments, when the peptide or polypeptide is produced by chemical synthesis, it is substantially free of chemical precursors or other chemicals, for example, it is separated from chemical precursors or other chemicals that are involved in the synthesis of the protein. In specific embodiments, where a lasso processing enzyme is produced by cell-free biosynthesis, it is substantially free of lasso precursors, other lasso processing enzymes, and/or in vitro TX-TL machinery in the cell flee biosynthesis system. Accordingly, such preparations of the lasso processing enzyme have less than about 30%, 25%, 20%, 15%, 10%, 5%, or 1% (by dry weight) of chemical precursors or compounds other than the lasso processing enzyme of interest. Contaminant components can also include, but are not limited to, materials that would interfere with activities for the lasso processing enzymes, and may include enzymes, hormones, and other proteinaceous or non-proteinaceous solutes. In certain embodiments, a peptide or polypeptide will be purified (1) to greater than 95% by weight of lasso peptide as determined by the Lowry method (Lowry et al., 1951, J. Bio. Chem. 193: 265-75), such as 96%, 97%, 98%, or 99%, (2) to a degree sufficient to obtain at least 15 residues of N terminal or internal amino acid sequence by use of a spinning cup sequenator, or (3) to homogeneity by SDS-PAGE under reducing or nonreducing conditions using Coomassie blue or silver stain. In specific embodiments, an isolated lasso processing enzyme includes the lasso processing enzyme in situ within recombinant cells since at least one component of the lasso processing enzyme natural environment will not be present. Ordinarily, however, isolated peptide and polypeptide will be prepared by at least one purification step. In specific embodiments, lasso peptides, or lasso precursors, one or more of lasso processing enzymes, co-factors, or a bacteriophage provided herein is isolated.

[0151] As used herein, the terms “in vitro transcription and translation” and “in vitro TX-TL” are used interchangeably and refer to a biosynthetic process outside an intact cell, where genes or oligonucleotides are transcribed into messenger ribonucleic acids (mRNAs), and mRNAs are translated into proteins or peptides. As used herein, the term “in vitro TX-TL machinery” refers to the components that act in concert to carry out the in vitro TX-TL. For the sole purpose of illustration, and by way of non-exhaustive and non-limiting examples, in some embodiments, an in vitro TX-TL machinery comprises enzyme(s) and co-factor(s) that carry out DNA transcription and/or mRNA translation. In some embodiments, an in vitro TX-TL machinery further comprises other small organic or inorganic molecules, such as amino acids, tRNAs or ATP, that facilitate the DNA transcription and/or mRNA translation. Various cellular components known to participate in in vivo transcription and translation can form part of the in vitro TX-TL machinery, see for example, Matsubayashi et al, “Purified cell-free systems as standard parts for synthetic biology.”; Curr Opin Chem Biol. 2014 October; 22:158-62; Li, et al. “Improved cell-free RNA and protein synthesis system.” PLoS One. 2014 Sep. 2; 9 (9):e106232. In some embodiments, different components can be provided individually and combined to assemble the in vitro TX-TL machinery. Exemplary ways of providing the in vitro TX-TL machinery components include recombinantly production, synthesis, and isolation from a cell. In some embodiments, the in vitro TX-TL machinery is provided in the form of one or more cell extract, or one or more supplemented cell extract that comprises the in vitro TX-TL machinery.

[0152] The terms “cell-free biosynthesis” and “CFB” are used interchangeably herein and refer to an in vitro (outside the cell) biosynthetic process for the production of one or more peptides or proteins. In some embodiments, cell-free biosynthesis occurs in a “cell-free biosynthesis reaction mixture” or “CFB reaction mixture” which provides various components, such as RNA, proteins, enzymes, co-factors, natural products, small molecules, organic molecules, to carry out protein synthesis outside a living cell. In some embodiments, the CFB reaction mixture can comprise one or more cell extracts or supplemented cell extracts, or commercially available cell-free reaction media (e.g. PURExpress®). Exemplary CFB methods and systems, including those involving the use of in vitro TX-TL, are described in Culler, S. et al., PCT Application WO2017/031399 A1, and is incorporated herein by reference.

[0153] Depending on the context, the term “condition suitable for lasso formation” may refer to, for example, a condition suitable for the expression of one or more protein products in a bacterial host (e.g., a lasso precursor peptide, or a processing enzyme). Exemplary suitable conditions included are not limited to a suitable culturing condition of the bacterial host that enable the protein synthesis and transportation in the host cell. Additionally or alternatively, depending on the context, the term “condition suitable for lasso formation” may refer to, for example, a condition suitable for post-translational modification of a lasso precursor peptide. Exemplary suitable conditions include but are not limited to a suitable temperature and/or incubation time for a lasso cyclase and/or lasso peptidase to process the lasso precursor in to a matured lasso peptide.

[0154] The term “display” and its grammatical variants, as used herein with respect to a chemical entity (e.g. a lasso peptide or functional fragment of lasso peptide), means to present or the presentation of the chemical entity (the “displayed entity”) in a manner so that it is chemically accessible in its environment and can be identified and/or distinguished from other chemical entities also present in the same environment. For example, a displayed entity can interact (e.g., bind to) or react (e.g. form covalent bonds) with other chemical entities (e.g., a target molecule) when the displayed entity is in contact with the other chemical entities. As disclosed herein, a displayed entity is affixed on a phage, where other components of the phage do not interfere with the chemical accessibility, activity, or reactivity intended for the displayed entity. For example, in certain embodiments, where the displayed entity is a lasso peptide for binding with a target protein (e.g., a cell surface protein), and/or modulating a biological activity of the target protein, then the phage capsid proteins are chemically inert with respect to the intended target binding or modulating activity of the lasso peptide.

[0155] “Bacteriophage” and “phage” are terms of art, and are used interchangeably to refer to a virus that infects and replicates within bacteria or archaea. Phages are composed of proteins that encapsulate a nucleic acid genome. Phages are classified by the International Committee on Taxonomy of Viruses (ICTV) according to morphology and nucleic acid, such as tailed phages, non-tailed phages, polyhedral phages, filamentous phages, and pleomorphic phages, DNA-containing phages, and RNA-containing phages, etc. Many phage species have been well-studied, and some are used as model organisms in various studies, such as a 186 phage, a λ phage, a Φ6 phage, a Φ29 phage, a ΦX 174, a G4 phage, an M13 phage, a fl phage, a fd phage, an MS2 phage, a N4 phage, a P1 phage, a P2 phage, a P4 phage, an RT7 phage, a T2 phage, a T4 phage, a T7 phage, or a T12 phage. Additional phage species can be found in Novik et al. in Antimicrobial research: Novel bioknowledge and educational programs; A. Mendex-Vilas, Ed.; pp. 251-259, 2017.

[0156] The term “structural protein” as used herein refers to one or more protein components of a phage that (i) form part of the protein capsid, (ii) facilitate packaging of the nucleic acid genome into the capsid, (iii) aid assembly of a phage particle, and/or (iv) for a budding phage, aid extrusion and budding of the phage particle, or for a lytic phage, aid lysis of the host cell. Exemplary phage structural proteins that can be used in connection with the present disclosure include but are not limited to protein p3, p4, p5, p6, p7, p8 and p9 of an M13 phage, and the protein components of a T4 phage, T7 phage or a X phage.

[0157] Particularly, a “coat protein” refers to a structural protein that locates on the surface of a phage, where at least a portion of the coat protein is chemically accessible in the environment containing the phage. Exemplary phage coat protein that can be used in connection with the present disclosure include but are not limited to protein p3, p6, p7, p8 and p9 of an M13 phage. A “nonessential outer capsid protein” refers to a phage coat protein that is nonessential for phage capsid assembly, and functional disruption and/or structural alteration of the protein does not affect phage productivity, viability, or infectivity. Examples of nonessential outer capsid proteins include but are not limited to HOC (highly antigenic outer capsid protein) and SOC (small outer capsid protein) of T4 phage. Other coat proteins that can be used for displaying a lasso peptide include but are not limited to pX of a T7 phage, pD or pV of a lambda (λ) phage (Bazan et al., Hum Vaccin Immunother. 2012, 8(12):1817-28), MS2 Coat Protein (CP) of an MS2 phage (Lino C A. et al., J Nanobiotechnology. 2017, 15(1):13), or the ΦX174 major spike protein G of a ΦX174 phage (Christakos K J. Virology. 2016, 488:242-8). Depending on the context, the term “bacteriophage” or “phage” as used herein may refer to a virus in its natural form or an artificially engineered version of the virus that is non-naturally existing.

[0158] The genome of a phage can be DNA- or RNA-based, and can encode as few as a handful of genes, or as many as hundreds of genes. According to the present disclosure, the genome of a phage may be genetically edited to encode more or less proteins as compared to its natural form, or to encode a variant, particularly a functional variant, of the natural phage protein. The term “functional variant” when used in connection with a phage protein refers to a protein that differs in the amino acid sequence from its natural counterpart, while retaining the function of the natural counterpart. For example, a functional variant of a bacteriophage coat protein retains the ability of assembly onto the surface of the phage where chemically accessible to agents present in the environment containing the phage. In exemplary embodiments, the functional variant of a coat protein can be a truncated version of the coat protein. In exemplary embodiments, the functional variant of a coat protein can be a fusion protein comprising a lasso peptide component fused to the coat protein or a variant thereof. In some embodiments, the genome of a phage is replaced by a phagemid. In some embodiments, a functional variant of protein or peptide has greater than 30% sequence identity of the protein or peptide. In various embodiments, a functional variant of a protein or a peptide can have greater than 30%, or greater than 40%, or greater than 50%, or greater than 60%, or greater than 70%, or greater than 880%, or greater than 90%, or greater than 95%, or greater than 99%, sequence identity to the protein or peptide.

[0159] “Phagemid” is also a term of art, and refers to a nucleic acid cloning vector that comprises a sequence encoding one or more proteins of interest as well as a sequence that signals for the packaging of the phagemid into a protein capsid of a phage. Proteins of the phage capsid that encapsulate the phagemid can be encoded by the phagemid itself or by one or more separate nucleic acid molecule. Proteins of the phage capsid and the packaging signal sequence of the phagemid can be derived from the same or distinct phage species. In some embodiments, the phagemid is packaged into the phage capsid in the form of a single-stranded (ss) nucleic acid molecule. In various embodiments, a phagemid can be a DNA-based vector or a RNA-based vector. For example, in some embodiments, a phagemid may contain an origin of replication from an fl phage (fl ori) that enables ssDNA replication and packaging into the phage capsid. In some embodiments, a phagemid may further contain an origin of replication derived from a bacterial double-stranded (ds) DNA plasmid that enables replication of dsDNA. In some embodiments, a phagemid can be used in combination with another vector encoding filamentous phage M13 structural proteins; the fl ori sequence enables packaging of the phagemid into an M13 phage capsid.

[0160] The term “display library” as used herein refers to the collection of a plurality of displayed entities, and each of the plurality of displayed entities in a library is a “member” of the library. To be clear, a “member” of the library refers to a unique displayed entity that is distinct from any other displayed entity(ies) that are present in the library. A library may comprise multiple identical copies of the same displayed entity, and the identical copies are collectively referred to as one member of the library. As used herein, two lasso peptides are considered “different” or “distinct” if they have different amino acid sequences or different structures (e.g., secondary, tertiary, or quaternary structure), or both different amino acid sequences and structures with respect to each other. For example, lasso cyclases having different selectivity for ring-forming amino acid residues can produce different lasso peptides from the same lasso core peptide by forming different ring structures.

[0161] Particularly, a “phage display library” is a collection of phages (e.g., filamentous phages), each phage comprising (i) at least one coat protein containing a lasso peptide component, and (ii) a nucleic acid molecule encoding at least a portion of the lasso peptide component. The coat protein is assembled on the surface of the phage where the lasso peptide component is chemically accessible to entities contacted with the phage. For example, the lasso peptide component can be a lasso precursor peptide or lasso core peptide capable of being processed into a matured lasso peptide or functional fragment of lasso peptide when contacted with one or more lasso biosynthesis components (e.g., lasso cyclase, lasso peptidase, and/or RRE). For another example, the lasso peptide component can be a lasso peptide or functional fragment of lasso peptide capable of binding to a target protein when contacted with the target protein.

[0162] A microbial cell (e.g., a bacteria or archaea cell) infected or susceptible to infection by a phage is referred to as the “host” of the phage.

[0163] “Periplasmic space” is a term of art and refers to the space between the inner cytoplasmic membrane and the bacterial outer membrane of a bacteria or archaea.

[0164] A “secretion signal” as used herein refers to a peptide, when becoming part of a protein, functions to direct transportation of the protein to a particular intracellular location or to the outside of the cell. A periplasmic secretion signal directs transportation of a protein containing the secretion signal to the periplasmic space. The transported protein can be soluble and floating in the periplasmic space, or can be attached to the inner cytoplasmic membrane. An extracellular secretion signal directs transportation of a protein containing the secretion signal to the outside of the cell. In some embodiments, the secretion signal peptide works in concert with other cellular proteins to effectuate the transportation. These other cellular proteins may be endogenously encoded by the cell's genome or exogenously introduced into the cell. In some embodiments, the secretion signal is removed from the transported protein after the transportation is completed or during the transportation process via endogenous or exogenous mechanisms.

[0165] The term “solid support” or “solid surface” means, without limitation, any column (or column material), plate (including multi-well plates), bead, test tube, microliter dish, solid particle (for example, agarose or sepharose), microchip (for example, silicon, silicon-glass, or gold chip), or membrane (for example, the membrane of a liposome or vesicle) to which a sample may be placed or affixed, either directly or indirectly (for example, through other binding partner intermediates such as antibodies).

[0166] The term “attached” or “associated” as used herein describes the interaction between or among two or more groups, moieties, compounds, monomers etc., e.g., a lasso peptide and a nucleic acid molecule. When two or more entities are “attached” to or “associated” with one another as described herein, they are linked by a direct or indirect covalent or non-covalent interaction. In some embodiments, the attachment is covalent. The covalent attachment may be, for example, but without limitation, through an amide, ester, carbon-carbon, disulfide, carbamate, ether, thioether, urea, amine, or carbonate linkage. The covalent attachment may also include a linker moiety, for example, a cleavable linker. Exemplary non-covalent interactions include hydrogen bonding, van der Waals interactions, dipole-dipole interactions, pi stacking interactions, hydrophobic interactions, magnetic interactions, electrostatic interactions, etc. Exemplary non-covalent binding pairs that can be used in connection with the present disclosure includes but are not limited to binding interaction between a ligand and its receptor, such as avidin or streptavidin and its binding moieties, including biotin or other streptavidin binding proteins.

[0167] The term “intact” as used herein with respect to a lasso peptide refers to the status of topologically intact. Thus, an “intact” lasso peptide is one comprising the complete lariat-like topology as described herein, including the terminal ring, middle loop and terminal tail. A sequence variant or a fragment of a lasso peptide may still be an intact lasso peptide, as long as the sequence variant or fragment of the lasso peptide still forms the lariat-like topology. For example, a lasso peptide having an amino acid residue truncated from its tail portion and another amino acid residue deleted from its ring portion may still form the lariat-like topology, even though the tail is shortened, and the ring is tightened. Such a variant is still considered an intact lasso peptide. In some embodiments, an intact lasso peptide has one or more effector functions.

[0168] In the context of a peptide or polypeptide, the term “fragment” as used herein refers to a peptide or polypeptide that comprises less than the full length amino acid sequence. Such a fragment may arise, for example, from a truncation at the amino terminus, a truncation at the carboxy terminus, and/or an internal deletion of a residue(s) from the amino acid sequence. Fragments may, for example, result from alternative RNA splicing or from in vivo protease activity. In various embodiments, protein fragments include polypeptides comprising an amino acid sequence of at least 5 contiguous amino acid residues, at least 10 contiguous amino acid residues, at least 15 contiguous amino acid residues, at least 20 contiguous amino acid residues, at least 25 contiguous amino acid residues, at least 30 contiguous amino acid residues, at least 40 contiguous amino acid residues, at least 50 contiguous amino acid residues, at least 60 contiguous amino residues, at least 70 contiguous amino acid residues, at least 80 contiguous amino acid residues, at least 90 contiguous amino acid residues, at least contiguous 100 amino acid residues, at least 125 contiguous amino acid residues, at least 150 contiguous amino acid residues, at least 175 contiguous amino acid residues, at least 200 contiguous amino acid residues, at least 250, at least 300, at least 350, at least 400, at least 450, at least 500, at least 550, at least 600, at least 650, at least 700, at least 750, at least 800, at least 850, at least 900, or at least 950 contiguous amino acid residues of the protein. In a specific embodiment, a fragment of a protein retains at least 1, at least 2, at least 3, or more functions of the protein.

[0169] A “functional fragment,” “binding fragment,” or “target-binding fragment” of a lasso peptide retains some but not all of the topological features of an intact lasso peptide, while retaining at least one if not some or all of the biological functions attributed to the intact lasso peptide. The function comprises at least binding to or associating with a target molecule, directly or indirectly. For example, a functional fragment of a lasso peptide may retain only the ring structure without the loop and the tail (i.e., a head-to-tail cyclic peptide) or with an unthreaded tail loosely extended from the ring (i.e., a branched-cyclic peptide). In some embodiments, the loose tail may have the complete or partial amino acid sequence of the loop and tail portions of an intact lasso peptide. For example, lassomycin as described in Garvish et al. (Chem Biol. 2014 Apr. 24; 21(4): 509-518) is a functional fragment of lasso peptide that has the same amino acid sequence as lassomycin and the lariat-like topology. A functional fragment of a lasso peptide may only retain the ring and the loop structures without a tail portion. The various topologies assumed by functional fragments of lasso peptides are herein collectively referred to as the “lasso-related topologies.” Functional fragments of lasso peptides can be recombinantly produced in cells or produced via cell-flee biosynthesis as described further below.

[0170] As used herein, the term “contacting” and its grammatical variations, when used in reference to two or more components, refers to any process whereby the approach, proximity, mixture or commingling of the referenced components is promoted or achieved without necessarily requiring physical contact of such components, and includes mixing of solutions containing any one or more of the referenced components with each other. The referenced components may be contacted in any particular order or combination and the particular order of recitation of components is not limiting. For example, “contacting A with B and C” encompasses embodiments where A is first contacted with B then C, as well as embodiments where C is contacted with A then B, as well as embodiments where a mixture of A and C is contacted with B, and the like. Furthermore, such contacting does not necessarily require that the end result of the contacting process be a mixture including all of the referenced components, as long as at some point during the contacting process all of the referenced components are simultaneously present or simultaneously included in the same mixture or solution. Where one or more of the referenced components to be contacted includes a plurality (e.g., “contacting a library of candidate lasso peptides with the target molecule”), then each member of the plurality can be viewed as an individual component of the contacting process, such that the contacting can include contacting of any one or more members of the plurality with any other member of the plurality and/or with any other referenced component (e.g., some or all of the plurality of candidate lasso peptides can be contacted with a target molecule) in any order or combination.

[0171] The terms “target molecule” and “target protein” are used interchangeably herein and refer to a protein with which a lasso peptide binds under a physiological condition that mimics the native environment where the protein is isolated or derived from. As used herein, the target molecule is a cell surface protein or an extracellularly secreted protein. “Cell surface protein” is a term of art, and is used herein to refer to any protein that is known by the skilled person as a cell surface protein, and including those with any form of post-translational modifications, such as glycosylation, phosphorylation, lipidation, etc. In various embodiments, a cell surface protein can be a peptide or protein that has at least one part exposed to the extracellular environment, while embedded in or span the lipid layer of the cell membrane, or associated with a molecule integrated in the lipid layer. Exemplary types of cell surface proteins that can be used in connection with the present application include but are not limited to cell surface receptors, biomarkers, transporters, ion channels, and enzymes, where one particular protein may fit into one or more of these categories. In specific embodiments, cell surface protein is a cell surface receptor, such as a glucagon receptor, an endothelin receptor, an atrial natriuretic factor receptor, a G protein-coupled receptor (GPCR). In specific embodiments, cell surface protein is a cell surface ligand for a receptor, such as a PD-1 ligand (PD-L1 or PD-L2). In certain embodiments, a target molecule mediates one or more cellular activities (e.g., through a cellular signaling pathway), and as a result of the binding of a lasso peptide to the target molecule, the cellular activities are modulated. In some embodiments, a target molecule can be a protein secreted by a cell to the extracellular environment, such as growth factors, cytokines, etc.

[0172] The term “target site” as used herein refers to the amino acid residue or the group of amino acid residues with which a particular lasso peptide interacts to form the binding with the target molecule. According to the present disclosure, different lasso peptides may bind to different target sites or compete for binding with the same target site of a target molecule. In some embodiments, a lasso peptide specifically binds to a target molecule or a target site thereof.

[0173] The term “binds” or “binding” refer to an interaction between molecules including, for example, to form a complex. Interactions can be, for example, non-covalent interactions including hydrogen bonds, ionic bonds, hydrophobic interactions, and/or van der Waals interactions. A complex can also include the binding of two or more molecules held together by covalent or non-covalent bonds, interactions, or forces. The strength of the total non-covalent interactions between a single target-binding site of a binding protein and a single target site of a target molecule is the affinity of the binding protein or functional fragment for that target site. The ratio of dissociation rate (k_{off}) to association rate (kₒₙ) of a binding protein to a monovalent target site (k_{off}/kₒₙ) is the dissociation constant K_{D}, which is inversely related to affinity. The lower the K_{D} value, the higher the affinity of the antibody. The value of K_{D} varies for different complexes of lasso peptides or target proteins depends on both kₒₙ and k_{off}. The dissociation constant K_{D} for a binding protein (e.g., a lasso peptide) provided herein can be determined using any method provided herein or any other method well known to those skilled in the art. The affinity at one binding site does not always reflect the true strength of the interaction between a binding protein and the target molecule. When complex target molecule containing multiple, repeating target sites, such as a polyvalent target protein, come in contact with lasso peptides containing multiple target binding sites, the interaction of the lasso peptide with the target protein at one site will increase the probability of a reaction at a second site.

[0174] The terms “lasso peptides that specifically bind to a target molecule,” “lasso peptides that specifically bind to a target site,” and analogous terms are also used interchangeably herein and refer to lasso peptides that specifically bind to a target molecule, such as a polypeptide, or fragment, or ligand-binding domain. A lasso peptide that specifically binds to a target protein may bind to the extracellular domain or a peptide derived from the extracellular domain of the target protein. A lasso peptide that specifically binds to a target protein of a specific species origin (e.g., a human protein) may be cross-reactive with the target protein of a different species origin (e.g., a cynomolgus protein). In certain embodiments, a lasso peptide that specifically binds to a target protein of a specific species origin does not cross-react with the target protein from another species of origin.

[0175] A lasso peptide that specifically binds to a target protein can be identified, for example, by immunoassays (e.g., ELISA, fluorescent immunosorbent assay, chemiluminescence immune assay, radioimmunoassay (RIA), enzyme multiplied immunoassay, solid phase radioimmunoassay (SPRIA), a surface plasmon resonance (SPR) assay (e.g., Biacore®), a fluorescence polarization assay, a fluorescence resonance energy transfer (FRET) assay, Dot-blot assay, fluorescence activated cell sorting (FACS) assay, or other techniques known to those of skill in the art. A lasso peptide binds specifically to a target protein when it binds to the target protein with higher affinity than to any cross-reactive target molecule as determined using experimental techniques, such as radioimmunoassays (RIA) and enzyme linked immunosorbent assays (ELISAs). Typically a specific or selective reaction will be at least twice background signal or noise and may be more than 10 times background.

[0176] A lasso peptide which “binds a target molecule of interest” is one that binds the target molecule with sufficient affinity such that the lasso peptide is useful, for example, as a diagnostic or therapeutic agent in targeting a cell or tissue expressing the target molecule, and does not significantly cross-react with other molecules. In such embodiments, the extent of binding of the lasso peptide to a “non target” molecule will be less than about 10% of the binding of the lasso peptide to its particular target molecule, for example, as determined by fluorescence activated cell sorting (FACS) analysis or RIA.

[0177] With regard to the binding of a lasso peptide to a target molecule, the term “specific binding,” “specifically binds to,” or “is specific for” a particular polypeptide or an fragment on a particular polypeptide target means binding that is measurably different from a non-specific interaction. Specific binding can be measured, for example, by determining binding of a molecule compared to binding of a control molecule, which generally is a molecule of similar structure that does not have binding activity. For example, specific binding can be determined by competition with a control molecule that is similar to the target, for example, an excess of non-labeled target. In this case, specific binding is indicated if the binding of the labeled target to a probe is competitively inhibited by excess unlabeled target. The term “specific binding,” “specifically binds to,” or “is specific for” a particular polypeptide or a fragment on a particular polypeptide target as used herein refers to binding where a molecule binds to a particular polypeptide or fragment on a particular polypeptide without substantially binding to any other polypeptide or polypeptide fragment. In certain embodiments, a lasso peptide that binds to a target molecule has a dissociation constant (K_{D}) of less than or equal to 100 μM, 80 μM, 50 μM, 25 μM, 10 μM, 5 μM, 1 μM, 900 nM, 800 nM, 700 nM, 600 nM, 500 nM, 400 nM, 300 nM, 200 nM, 100 nM, 50 nM, 10 nM, 5 nM, 4 nM, 3 nM, 2 nM, 1 nM, 0.9 nM, 0.8 nM, 0.7 nM, 0.6 nM, 0.5 nM, 0.4 nM, 0.3 nM, 0.2 nM, or 0.1 nM.

[0178] In the context of the present disclosure, a target protein is said to specifically bind or selectively bind to a lasso peptide, for example, when the dissociation constant (K_{D}) is <10⁻⁷ M. In some embodiments, the lasso peptides specifically bind to a target protein with a K_{D} of from about 10⁻⁷ M to about 10⁻¹² M. In certain embodiments, the lasso peptides specifically bind to a target protein with high affinity when the K_{D} is <10⁻⁸M or K_{D} is <10⁻⁹M. In one embodiment, the lasso peptides may specifically bind to a purified human target protein with a K_{D} of from 1×10⁻⁹ M to 10×10⁻⁹ M as measured by Biacore®. In another embodiment, the lasso peptides may specifically bind to a purified human target protein with a K_{D} of from 0.1×10⁻⁹ M to 1×10⁻⁹ M as measured by KinExA™ (Sapidyne, Boise, Id.). In yet another embodiment, the lasso peptides specifically bind to a target protein expressed on cells with a K_{D} of from 0.1×10⁻⁹M to 10×10⁻⁹M. In certain embodiments, the lasso peptides specifically bind to a human target protein expressed on cells with a K_{D} of from 0.1×10⁻⁹M to 1×10⁻⁹M. In some embodiments, the lasso peptides specifically bind to a human target protein expressed on cells with a K_{D} of 1×10⁻⁹M to 10×10⁻⁹M. In certain embodiments, the lasso peptides specifically bind to a human target protein expressed on cells with a K_{D} of about 0.1×10⁻⁹M, about 0.5×10⁻⁹M, about 1×10⁻⁹M, about 5×10⁻⁹M, about 10×10⁻⁹M, or any range or interval thereof. In still another embodiment, the lasso peptides specifically bind to a non-human target protein expressed on cells with a K_{D} of 0.1×10⁻⁹M to 10×10⁻⁹M. In certain embodiments, the lasso peptides specifically bind to a non-human target protein expressed on cells with a K_{D} of from 0.1×10⁻⁹M to 1×10⁻⁹M. In some embodiments, the lasso peptides specifically bind to a non human target protein expressed on cells with a K_{D} of 1×10⁻⁹M to 10×10⁻⁹M. In certain embodiments, the lasso peptides specifically bind to a non-human target protein expressed on cells with a K_{D} of about 0.1×10⁻⁹M, about 0.5×10⁻⁹M, about 1×10⁻⁹M, about 5×10⁻⁹M, about 10×10⁻⁹M, or any range or interval thereof.

[0179] “Binding affinity” generally refers to the strength of the sum total of noncovalent interactions between a single binding site of a molecule (e.g., a binding protein such as a lasso peptide) and its binding partner (e.g., a target protein). Unless indicated otherwise, as used herein, “binding affinity” refers to intrinsic binding affinity which reflects a 1:1 interaction between members of a binding pair (e.g., lasso peptide and target protein). The affinity of a binding molecule X for its binding partner Y can generally be represented by the dissociation constant (K_{D}). Affinity can be measured by common methods known in the art, including those described herein. Low-affinity lasso peptides generally bind target proteins slowly and tend to dissociate readily, whereas high-affinity lasso peptides generally bind target proteins faster and tend to remain bound longer. A variety of methods of measuring binding affinity are known in the art, any of which can be used for purposes of the present disclosure. Specific illustrative embodiments include the following. In one embodiment, the “K_{D}” or “K_{D} value” may be measured by assays known in the art, for example by a binding assay. The K_{D} may be measured in a RIA, for example, performed with the lasso peptide of interest and its target protein. The K_{D} or K_{D} value may also be measured by using surface plasmon resonance assays by Biacore®, using, for example, a Biacore® TM-2000 or a Biacore® TM-3000, or by biolayer interferometry using, for example, the Octet® QK384 system. An “on-rate” or “rate of association” or “association rate” or “kₒₙ” may also be determined with the same surface plasmon resonance or biolayer interferometry techniques described above using, for example, a Biacore® TM-2000 or a Biacore® TM-3000, or the Octet® QK384 system.

[0180] The term “compete” when used in the context of lasso peptides (e.g., a lasso peptide and other binding proteins that bind to and compete for the same target molecule or target site on the target molecule) means competition as determined by an assay in which the lasso peptide (or binding fragment) thereof under study prevents or inhibits the specific binding of a reference molecule (e.g., a reference ligand of the target molecule) to a common target molecule. Numerous types of competitive binding assays can be used to determine if a test lasso peptide competes with a reference ligand for binding to a target molecule. Examples of assays that can be employed include solid phase direct or indirect RIA, solid phase direct or indirect enzyme immunoassay (EIA), sandwich competition assay (see, e.g., Stahli et al., 1983, Methods in Enzymology 9:242-53), solid phase direct biotin-avidin EIA (see, e.g., Kirkland et al., 1986, J. Immunol. 137:3614-19), solid phase direct labeled assay, solid phase direct labeled sandwich assay (see, e.g., Harlow and Lane, Antibodies, A Laboratory Manual (1988)), solid phase direct label RIA using I-125 label (see, e.g., Morel et al., 1988, Mol. Immunol. 25:7-15), and direct labeled RIA (Moldenhauer et al., 1990, Scand. J. Immunol. 32:77-82). Typically, such an assay involves the use of a purified target molecule bound to a solid surface, or cells bearing either of an unlabeled test target-binding lasso peptide or a labeled reference target-binding protein (e.g., reference target-binding ligand). Competitive inhibition may be measured by determining the amount of label bound to the solid surface in the presence of the test target-binding lasso peptide. Usually the test target-binding protein is present in excess. Target-binding lasso peptides identified by competition assay (e.g., competing lasso peptides) include lasso peptides binding to the same target site as the reference and lasso peptides binding to an adjacent target site sufficiently proximal to the target site bound by the reference for steric hindrance to occur. Additional details regarding methods for determining competitive binding are described herein. Usually, when a competing lasso peptide is present in excess, it will inhibit specific binding of a reference to a common target molecule by at least 30%, for example 40%, 45%, 50%, 55%, 60%, 65%, 70%, or 75%. In some instance, binding is inhibited by at least 80%, 85%, 90%, 95%, 96%, 97%, 98%, 99%, or more.

[0181] A “blocking” lasso peptide or an “antagonist” lasso peptide is one which inhibits or reduces biological activity of the target molecule it binds. For example, blocking lasso peptide or antagonist lasso peptide may substantially or completely inhibit the biological activity of the target molecule.

[0182] The term “inhibition” or “inhibit,” when used herein, refers to partial (such as, 1%, 2%, 5%, 10%, 20%, 25%, 50%, 75%, 90%, 95%, 99%) or complete (i.e., 100%) inhibition.

[0183] The term “attenuate,” “attenuation,” or “attenuated,” when used herein, refers to partial (such as, 1%, 2%, 5%, 10%, 20%, 25%, 50%, 75%, 90%, 95%, 99%) or complete (i.e., 100%) reduction in a property, activity, effect, or value.

[0184] An “agonist” lasso peptide is a lasso peptide that triggers a response, e.g., one that mimics at least one of the functional activities of a polypeptide of interest (e.g., an agonist lasso peptide for glucagon-like peptide-1 receptor (GLP-1R) wherein the agonist lasso peptide mimics the functional activities of glucagon-like peptide-1). An agonist lasso peptide includes a lasso peptide that is a ligand mimetic, for example, wherein a ligand binds to a cell surface receptor and the binding induces cell signaling or activities via an intercellular cell signaling pathway and wherein the lasso peptide induces a similar cell signaling or activation. For the sole purpose of illustration, an “agonist” of glucagon-like peptide-1 receptor refers to a molecule that is capable of activating or otherwise increasing one or more of the biological activities of glucagon-like peptide-1 receptor, such as in a cell expressing glucagon-like peptide-1 receptor. In some embodiments, an agonist of glucagon-like peptide-1 receptor (e.g., an agonistic lasso peptide as described herein) may, for example, act by activating or otherwise increasing the activation and/or cell signaling pathways of a cell expressing a glucagon receptor protein, thereby increasing a glucagon-like peptide-1 receptor-mediated biological activity of the cell relative to the glucagon-like peptide-1 receptor-mediated biological activity in the absence of agonist.

[0185] The phrase “substantially similar” or “substantially the same” denotes a sufficiently high degree of similarity between two numeric values (e.g., one associated with a lasso peptide of the present disclosure and the other associated with a reference ligand) such that one of skill in the art would consider the difference between the two values to be of little or no biological and/or statistical significance within the context of the biological characteristic measured by the values (e.g., K_{D} values). For example, the difference between the two values may be less than about 50%, less than about 40%, less than about 30%, less than about 20%, less than about 10%, or less than about 5%, as a function of the value for the reference ligand.

[0186] The phrase “substantially increased,” “substantially reduced,” or “substantially different,” as used herein, denotes a sufficiently high degree of difference between two numeric values (e.g., one associated with a lasso peptide of the present disclosure and the other associated with a reference ligand) such that one of skill in the art would consider the difference between the two values to be of statistical significance within the context of the biological characteristic measured by the values. For example, the difference between said two values can be greater than about 10%, greater than about 20%, greater than about 30%, greater than about 40%, or greater than about 50%, as a function of the value for the reference ligand.

[0187] As used herein, the term “modulating” or “modulate” refers to an effect of altering a biological activity (i.e. increasing or decreasing the activity), especially a biological activity associated with a particular biomolecule such as a cell surface receptor. For example, an inhibitor of a particular biomolecule modulates the activity of that biomolecule, e.g., an enzyme, by decreasing the activity of the biomolecule, such as an enzyme. Such activity is typically indicated in terms of an inhibitory concentration (IC₅₀) of the compound for an inhibitor with respect to, for example, an enzyme.

[0188] By “assaying” is meant the creation of experimental conditions and the gathering of data regarding a particular result of the exposure to specific experimental conditions. For example, enzymes can be assayed based on their ability to act upon a detectable substrate. A compound can be assayed based on its ability to bind to a particular target molecule or molecules.

[0189] The term “IC₅₀” refers to an amount, concentration, or dosage of a substance that is required for 50% inhibition of a maximal response in an assay that measures such response. The term “EC₅₀” refers to an amount, concentration, or dosage of a substance that is required for 50% of a maximal response in an assay that measures such response. The term “CC₅₀” refers an amount, concentration, or dosage of a substance that results in 50% reduction of the viability of a host. In certain embodiments, the CC₅₀ of a substance is the amount, concentration, or dosage of the substance that is required to reduce the viability of cells treated with the compound by 50%, in comparison with cells untreated with the compound. The term “Kₐ” refers to the equilibrium dissociation constant for a ligand and a protein, which is measured to assess the binding strength that a small molecule ligand (such as a small molecule drug) has for a protein or receptor, such as a cell surface receptor. The dissociation constant, K_{d}, is commonly used to describe the affinity between a ligand and a protein or receptor; i.e., how tightly a ligand binds to a particular protein or receptor, and is the inverse of the association constant. Ligand-protein affinities are influenced by non-covalent intermolecular interactions between the two molecules such as hydrogen bonding, electrostatic interactions, hydrophobic and van der Waals forces. The analogous term “Kᵢ” is the inhibitor constant or inhibition constant, which is the equilibrium dissociation constant for an enzyme inhibitor, and provides an indication of the potency of an inhibitor.

[0190] The term “identity” refers to a relationship between the sequences of two or more polypeptide molecules or two or more nucleic acid molecules, as determined by aligning and comparing the sequences. “Percent (%) amino acid sequence identity” with respect to a reference polypeptide sequence is defined as the percentage of amino acid residues in a candidate sequence that are identical with the amino acid residues in the reference polypeptide sequence, after aligning the sequences and introducing gaps, if necessary, to achieve the maximum percent sequence identity, and not considering any conservative substitutions as part of the sequence identity. Alignment for purposes of determining percent amino acid sequence identity can be achieved in various ways that are within the skill in the art, for instance, using publicly available computer software such as BLAST, BLAST-2, ALIGN, or MEGALIGN (DNAStar, Inc.) software. Those skilled in the art can determine appropriate parameters for aligning sequences, including any algorithms needed to achieve maximal alignment over the full length of the sequences being compared. Exemplary parameters for determining relatedness of two or more sequences using the BLAST algorithm, for example, can be as set forth below. Briefly, amino acid sequence alignments can be performed using BLASTP version 2.0.8 (Jan. 5, 1999) and the following parameters: Matrix: 0 BLOSUM62; gap open: 11; gap extension: 1; x_dropoff: 50; expect: 10.0; wordsize: 3; filter: on. Nucleic acid sequence alignments can be performed using BLASTN version 2.0.6 (Sep. 16, 1998) and the following parameters: Match: 1; mismatch: −2; gap open: 5; gap extension: 2; x_dropoff: 50; expect: 10.0; wordsize: 11; filter off. Those skilled in the art will know what modifications can be made to the above parameters to either increase or decrease the stringency of the comparison, for example, and determine the relatedness of two or more sequences.

[0191] A “modification” of an amino acid residue/position refers to a change of a primary amino acid sequence as compared to a starting amino acid sequence, wherein the change results from a sequence alteration involving said amino acid residue/position. For example, typical modifications include substitution of the residue with another amino acid (e.g., a conservative or non-conservative substitution), insertion of one or more (e.g., generally fewer than 5, 4, or 3) amino acids adjacent to said residue/position, and/or deletion of said residue/position.

[0192] The term “host cell” as used herein refers to a particular subject cell that may be transfected with a nucleic acid molecule and the progeny or potential progeny of such a cell. Progeny of such a cell may not be identical to the parent cell transfected with the nucleic acid molecule due to mutations or environmental influences that may occur in succeeding generations or integration of the nucleic acid molecule into the host cell genome.

[0193] As used herein, the terms “microbial,” “microbial organism” or “microorganism” are intended to mean any organism that exists as a microscopic cell that is included within the domains of archaea, bacteria or eukarya. Therefore, the term is intended to encompass prokaryotic or eukaryotic cells or organisms having a microscopic size and includes bacteria, archaea and eubacteria of all species as well as eukaryotic microorganisms such as yeast and fungi. The term also includes cell cultures of any species that can be cultured for the production of a biochemical.

[0194] The term “vector” refers to a substance that is used to carry or include a nucleic acid sequence, including for example, a nucleic acid sequence encoding a lasso precursor peptide, or lasso processing enzymes as described herein, in order to introduce a nucleic acid sequence into a host cell. Vectors applicable for use include, for example, expression vectors, plasmids, phage vectors, viral vectors, episomes, and artificial chromosomes, which can include selection sequences or markers operable for stable integration into a host cell's chromosome. Additionally, the vectors can include one or more selectable marker genes and appropriate expression control sequences. Selectable marker genes that can be included, for example, provide resistance to antibiotics or toxins, complement auxotrophic deficiencies, or supply critical nutrients not in the culture media. Expression control sequences can include constitutive and inducible promoters, transcription enhancers, transcription terminators, and the like, which are well known in the art. When two or more nucleic acid molecules are to be co-expressed (e.g., both a lasso core peptide and a lasso cyclase), both nucleic acid molecules can be inserted, for example, into a single expression vector or in separate expression vectors. For single vector expression, the encoding nucleic acids can be operationally linked to one common expression control sequence or linked to different expression control sequences, such as one inducible promoter and one constitutive promoter. The introduction of nucleic acid molecules into a host cell can be confirmed using methods well known in the art. Such methods include, for example, nucleic acid analysis such as Northern blots or polymerase chain reaction (PCR) amplification of mRNA, immunoblotting for expression of gene products, or other suitable analytical methods to test the expression of an introduced nucleic acid sequence or its corresponding gene product. It is understood by those skilled in the art that the nucleic acid molecules are expressed in a sufficient amount to produce a desired product (e.g., a lasso precursor peptide as described herein), and it is further understood that expression levels can be optimized to obtain sufficient expression using methods well known in the art.

[0195] The term “identification peptide” as used herein refers to a peptide configured to identify a corresponding lasso peptide fragment. Various mechanisms of identification are contemplated. For example, in some embodiments, the identification peptide can produce a unique signal indicating the identity of the corresponding lasso peptide fragment. Thus, in some embodiments, the identification peptide can be a detectable probe or agent. In other embodiments, the identification peptide can enable specific isolation of the corresponding lasso peptide component from other components for further identification, characterization and/or use. In some embodiments, the identification peptide can be a purification tag. Other mechanisms of identification that are within the knowledge of those of ordinary skill in the art are also contemplated for the present disclosure.

[0196] The term “detectable probe” refers to a composition that provides a detectable signal. The term includes, without limitation, any fluorophore, chromophore, radiolabel, enzyme, antibody or antibody fragment, and the like, that provide a detectable signal via its activity.

[0197] The term “detectable agent” refers to a substance that can be used to ascertain the existence or presence of a desired molecule, such as a complex between a lasso peptide and a target molecule as described herein, in a sample or subject. A detectable agent can be a substance that is capable of being visualized or a substance that is otherwise able to be determined and/or measured (e.g., by quantitation).

[0198] The term “purification tag” refers to any peptide sequence suitable for purification or identification of a polypeptide. The purification tag specifically binds to another moiety with affinity for the purification tag. Such moieties which specifically bind to a purification tag are usually attached to a matrix or a resin, such as agarose beads. Moieties which specifically bind to purification tags include antibodies, other proteins (e.g. Protein A or Streptavidin), nickel or cobalt ions or resins, biotin, amylose, maltose, and cyclodextrin. Exemplary purification tags include histidine (HIS) tags (such as a hexahistidine peptide), which will bind to metal ions such as nickel or cobalt ions. Other exemplary purification tags are the myc tag (EQKLISEEDL), the Strep tag (WSHPQFEK), the Flag tag (DYKDDDDK) and the V5 tag (GKPIPNPLLGLDST). The term “purification tag” also includes “epitope tags”, i.e., peptide sequences which are specifically recognized by antibodies. Exemplary epitope tags include the FLAG tag, which is specifically recognized by a monoclonal anti-FLAG antibody. The peptide sequence recognized by the anti-FLAG antibody consists of the sequence DYKDDDDK or a substantially identical variant thereof. In some embodiments, the polypeptide domain fused to the transposase comprises two or more tags, such as a SUMO tag and a STREP tag. The term “purification tag” also includes substantially identical variants of purification tags. “Substantially identical variant” as used herein refers to derivatives or fragments of purification tags which are modified compared to the original purification tag (e.g. via amino acid substitutions, deletions or insertions), but which retain the property of the purification tag of specifically binding to a moiety which specifically recognizes the purification tag. Additional exemplary purification tags that can be used in connection with the present disclosure include Albumin-binding protein (ABP), Alkaline Phosphatase (AP), AU1 epitope, AU5 epitope, Bacteriophage 17 epitope (T7 tag), Bacteriophage V5 epitope (V5-tag), Biotin-carboxy carrier protein (BCCP), Bluetongue virus tag (B tag), Calmodulin binding peptide (CBP), Chloramphenicol Acetyl Transferase (CAT), Cellulose binding domain (CBD), Chitin binding domain (CBD), Choline-binding domain (CBD), Dihydrofolate reductase (DHFR), E2 epitope, FLAG epitope, Galactose-binding protein (GBP), Green fluorescent protein (GFP), Glu-Glu (EE-tag), Glutathione-S-transferase (GST), Human influenza hemagglutinin (HA), HaloTag®, Histidine affinity tag (HAT), Horseradish peroxidase (HRP), HSV epitope, Ketosteroid isomerase (KSI), KT3 epitope, LacZ, Luciferase, Maltose-binding protein (MBP), Myc epitope, NusA, PDZ ligand, Polyarginine (Arg-tag), Polyaspartate (Asp-tag), Polycysteine (Cys-tag), Polyhistidine (His-tag), Polyphenylalanine (Poly-tag), Profinity eXact™, Protein C, S1 tag, S-tag, Streptavidin-binding peptide (SBP), Staphylococcal protein A (Protein A), Staphylococcal protein G (Protein G), Strep-tag, Streptavidin, Small Ubiquitin-like Modifier (SUMO), Tandem Affinity Purification (TAP), T7 epitope, Thioredoxin (Trx), TrpE, Ubiquitin, Universal, VSV-G.

### 5.3 Phage Display Library of Lasso Peptides and Methods of Making the Same

[0199] Provided herein are phage display libraries that comprises diversified species of lasso peptides or functional fragments of lasso peptides. In some embodiments, the library comprises a plurality of phage each expresses on its surface a coat protein, and the coat protein comprises a lasso peptide fragment. In some embodiments, the coat protein further comprises a non-lasso component having the amino acid sequence of a coat protein of the phage. In some embodiments, the coat protein comprises the lasso peptide component fused to non-lasso component. Particularly, in some embodiments, the lasso peptide component is fused to the non-lasso component via a cleavable linker, and upon cleavage of the linker, the lasso peptide component is severed from the phage.

[0200] According to the present disclosure, the lasso peptide fragment can assume the form of (i) an intact lasso peptide, (ii) a functional fragment of a lasso peptide, (iii) a lasso precursor peptide, or (iv) a lasso core peptide. A lasso peptide fragment can undergo transition among the different forms under a suitable condition. For example, when in contact with one or more lasso peptide biosynthesis component (e.g., a lasso peptidase, a lasso cyclase, and/or an RRE), a lasso peptide component in the form of a lasso precursor can be processed into the form of a lasso core peptide, and/or further processed into the form of an intact lasso peptide or a functional fragment of lasso peptide. In some embodiments, neither the non-lasso component of the coat protein nor other components of the phage interferes with either the functional or structural feature of the lasso peptide component.

[0201] According to the present disclosure, the amino acid sequence of the lasso peptide component can be encoded by a natural gene sequence (e.g., Gene A sequence of a lasso peptide biosynthesis gene cluster). In some embodiments, the lasso peptide component has the same amino acid sequence as a natural protein or peptide. Alternatively, the amino acid sequence of the lasso peptide component can be encoded by an artificially designed nucleic acid sequence that is non-naturally existing. In some embodiments, the lasso peptide component is a variant of a natural protein or peptide. Particularly, in some embodiments, one or more mutations can be introduced into the sequence of Gene A of a lasso peptide biosynthesis gene cluster to modify the coding sequence for a lasso peptide component. In some embodiments, the phage further comprises a nucleic acid molecule encoding at least part of the lasso peptide component displayed on the phage.

[0202] Protein and nucleic acid components of the phage display libraries, and methods and systems for producing the phage display library are described in further details below.

[0203] 5.3.1 Lasso Peptides

[0204] As provided herein, an intact lasso peptide comprises the complete lariat-like topology as exemplified in FIG. 1. In some embodiments, the ring structure of a lasso peptide is formed through, for example, covalent bonding between a terminal amino acid residue and an internal amino acid residue. In some embodiments, the ring is formed via disulfide bonding between two or more amino acid residues of the lasso peptide. In alternative embodiments, the ring is formed via non-covalent interaction between two or more amino acid residues of the lasso peptide. In yet alternative embodiments, the ring is formed via both covalent and non-covalent interactions between at least two amino acid residues of the lasso peptide. In some embodiments, the ring is located at the C-terminus of the lasso peptide. In other embodiments, the ring is located at the N-terminus of the lasso peptide.

[0205] In specific embodiments, an N-terminal ring structure is formed by the formation of a bond between the N-terminal amino acid residue of the lasso peptide and an internal amino acid residue of the lasso peptide. In specific embodiment, an N-terminal ring structure is formed by formation of an isopeptide bond between the N-terminal amino group and the carboxyl group in the side chain of an internal amino acid residue, such as glutamate or aspartate residue, of the lasso peptide. In specific embodiments, an N-terminal ring structure is formed by the formation of an isopeptide bond between the N-terminal amino group and the carboxyl group in the side chain of an internal amino acid residue, such as glutamate or aspartate residue, located at the 6^{th} to 20^{th} position in the lasso peptide amino acid sequence, counting from its N terminus.

[0206] In specific embodiments, an N-terminal ring structure is formed by the formation of an isopeptide bond between the N-terminal amino group and the carboxyl group in the side chain of a glutamate located at the 6^{th} position in the lasso peptide amino acid sequence, counting from its N terminus, such that the lasso peptide has an N-terminal 6-member ring. In specific embodiments, an N-terminal ring structure is formed by the formation of an isopeptide bond between the N terminal amino group and the carboxyl group in the side chain of a glutamate located at the 7^{th} position in the lasso peptide amino acid sequence, counting from its N terminus, such that the lasso peptide has an N-terminal 7-member ring. In specific embodiments, an N-terminal ring structure is formed by the formation of an isopeptide bond between the N-terminal amino group and the carboxyl group in the side chain of a glutamate located at the 8^{th} position in the lasso peptide amino acid sequence, counting from its N terminus, such that the lasso peptide has an N-terminal 8-member ring. In specific embodiments, an N-terminal ring structure is formed by the formation of an isopeptide bond between the N-terminal amino group and the carboxyl group in the side chain of a glutamate located at the 9^{th} position in the lasso peptide amino acid sequence, counting from its N terminus, such that the lasso peptide has an N-terminal 9-member ring. In specific embodiments, an N-terminal ring structure is formed by the formation of an isopeptide bond between the N-terminal amino group and the carboxyl group in the side chain of a glutamate located at the 10^{th} position in the lasso peptide amino acid sequence, counting from its N terminus, such that the lasso peptide has an N-terminal 10-member ring. In specific embodiments, an N-terminal ring structure is formed by the formation of an isopeptide bond between the N-terminal amino group and the carboxyl group in the side chain of a glutamate located at the 11^{th} position in the lasso peptide amino acid sequence, counting from its N terminus, such that the lasso peptide has an N-terminal 11-member ring. In specific embodiments, an N-terminal ring structure is formed by the formation of an isopeptide bond between the N-terminal amino group and the carboxyl group in the side chain of a glutamate located at the 12^{th} position in the lasso peptide amino acid sequence, counting from its N terminus, such that the lasso peptide has an N-terminal 12-member ring. In specific embodiments, an N terminal ring structure is formed by the formation of an isopeptide bond between the N terminal amino group and the carboxyl group in the side chain of a glutamate located at the 13^{th} position in the lasso peptide amino acid sequence, counting from its N terminus, such that the lasso peptide has an N-terminal 13-member ring. In specific embodiments, an N terminal ring structure is formed by the formation of an isopeptide bond between the N-terminal amino group and the carboxyl group in the side chain of a glutamate located at the 14^{th} position in the lasso peptide amino acid sequence, counting from its N terminus, such that the lasso peptide has an N-terminal 14-member ring. In specific embodiments, an N terminal ring structure is formed by the formation of an isopeptide bond between the N-terminal amino group and the carboxyl group in the side chain of a glutamate located at the 15^{th} position in the lasso peptide amino acid sequence, counting from its N terminus, such that the lasso peptide has an N-terminal 15-member ring. In specific embodiments, an N terminal ring structure is formed by the formation of an isopeptide bond between the N-terminal amino group and the carboxyl group in the side chain of a glutamate located at the 16^{th} position in the lasso peptide amino acid sequence, counting from its N terminus, such that the lasso peptide has an N-terminal 16-member ring. In specific embodiments, an N terminal ring structure is formed by the formation of an isopeptide bond between the N-terminal amino group and the carboxyl group in the side chain of a glutamate located at the 17^{th} position in the lasso peptide amino acid sequence, counting from its N terminus, such that the lasso peptide has an N-terminal 17-member ring. In specific embodiments, an N terminal ring structure is formed by the formation of an isopeptide bond between the N-terminal amino group and the carboxyl group in the side chain of a glutamate located at the 18^{th} position in the lasso peptide amino acid sequence, counting from its N terminus, such that the lasso peptide has an N-terminal 18-member ring. In specific embodiments, an N terminal ring structure is formed by the formation of an isopeptide bond between the N-terminal amino group and the carboxyl group in the side chain of a glutamate located at the 19^{th} position in the lasso peptide amino acid sequence, counting from its N terminus, such that the lasso peptide has an N-terminal 19-member ring. In specific embodiments, an N terminal ring structure is formed by the formation of an isopeptide bond between the N-terminal amino group and the carboxyl group in the side chain of a glutamate located at the 20^{th} position in the lasso peptide amino acid sequence, counting from its N terminus, such that the lasso peptide has an N-terminal 20-member ring.

[0207] In specific embodiments, an N-terminal ring structure is formed by the formation of an isopeptide bond between the N-terminal amino group and the carboxyl group in the side chain of an aspartate located at the 6^{th} position in the lasso peptide amino acid sequence, counting from its N terminus, such that the lasso peptide has an N-terminal 6-member ring. In specific embodiments, an N terminal ring structure is formed by the formation of an isopeptide bond between the N terminal amino group and the carboxyl group in the side chain of an aspartate located at the 7^{th} position in the lasso peptide amino acid sequence, counting from its N terminus, such that the lasso peptide has an N-terminal 7-member ring. In specific embodiments, an N-terminal ring structure is formed by the formation of an isopeptide bond between the N-terminal amino group and the carboxyl group in the side chain of an aspartate located at the 8^{th} position in the lasso peptide amino acid sequence, counting from its N terminus, such that the lasso peptide has an N-terminal 8-member ring. In specific embodiments, an N-terminal ring structure is formed by the formation of an isopeptide bond between the N-terminal amino group and the carboxyl group in the side chain of an aspartate located at the 9^{th} position in the lasso peptide amino acid sequence, counting from its N terminus, such that the lasso peptide has an N-terminal 9-member ring. In specific embodiments, an N-terminal ring structure is formed by the formation of an isopeptide bond between the N-terminal amino group and the carboxyl group in the side chain of an aspartate located at the 10^{th} position in the lasso peptide amino acid sequence, counting from its N terminus, such that the lasso peptide has an N-terminal 10-member ring. In specific embodiments, an N-terminal ring structure is formed by the formation of an isopeptide bond between the N-terminal amino group and the carboxyl group in the side chain of an aspartate located at the 1 position in the lasso peptide amino acid sequence, counting from its N terminus, such that the lasso peptide has an N-terminal 11-member ring. In specific embodiments, an N-terminal ring structure is formed by the formation of an isopeptide bond between the N-terminal amino group and the carboxyl group in the side chain of an aspartate located at the 12^{th} position in the lasso peptide amino acid sequence, counting from its N terminus, such that the lasso peptide has an N-terminal 12-member ring. In specific embodiments, an N terminal ring structure is formed by the formation of an isopeptide bond between the N-terminal amino group and the carboxyl group in the side chain of an aspartate located at the 13^{th} position in the lasso peptide amino acid sequence, counting from its N terminus, such that the lasso peptide has an N-terminal 13-member ring. In specific embodiments, an N terminal ring structure is formed by the formation of an isopeptide bond between the N-terminal amino group and the carboxyl group in the side chain of an aspartate located at the 14^{th} position in the lasso peptide amino acid sequence, counting from its N terminus, such that the lasso peptide has an N-terminal 14-member ring. In specific embodiments, an N terminal ring structure is formed by the formation of an isopeptide bond between the N-terminal amino group and the carboxyl group in the side chain of an aspartate located at the 15^{th} position in the lasso peptide amino acid sequence, counting from its N terminus, such that the lasso peptide has an N-terminal 15-member ring. In specific embodiments, an N terminal ring structure is formed by the formation of an isopeptide bond between the N-terminal amino group and the carboxyl group in the side chain of an aspartate located at the 16^{th} position in the lasso peptide amino acid sequence, counting from its N terminus, such that the lasso peptide has an N-terminal 16-member ring. In specific embodiments, an N terminal ring structure is formed by the formation of an isopeptide bond between the N-terminal amino group and the carboxyl group in the side chain of an aspartate located at the 17^{th} position in the lasso peptide amino acid sequence, counting from its N terminus, such that the lasso peptide has an N-terminal 17-member ring. In specific embodiments, an N terminal ring structure is formed by the formation of an isopeptide bond between the N terminal amino group and the carboxyl group in the side chain of an aspartate located at the 18^{th} position in the lasso peptide amino acid sequence, counting from its N terminus, such that the lasso peptide has an N-terminal 18-member ring. In specific embodiments, an N terminal ring structure is formed by the formation of an isopeptide bond between the N terminal amino group and the carboxyl group in the side chain of an aspartate located at the 19^{th} position in the lasso peptide amino acid sequence, counting from its N terminus, such that the lasso peptide has an N-terminal 19-member ring. In specific embodiments, an N terminal ring structure is formed by the formation of an isopeptide bond between the N terminal amino group and the carboxyl group in the side chain of an aspartate located at the 20^{th} position in the lasso peptide amino acid sequence, counting from its N terminus, such that the lasso peptide has an N-terminal 20-member ring.

[0208] In specific embodiments, a C-terminal ring structure is formed by the formation of a bond between the C terminal amino acid residue of the lasso peptide and an internal amino acid residue of the lasso peptide. In specific embodiment, a C-terminal ring structure is formed by formation of an isopeptide bond between the C-terminal carboxyl group and the amino or amide group in the side chain of an internal amino acid residue, such as Asparagine, Glutamine or lysine residue, of the lasso peptide. In specific embodiments, a C-terminal ring structure is formed by the formation of an isopeptide bond between the C-terminal carboxyl group and the amino or amide group in the side chain of an internal amino acid residue, such as Asparagine, Glutamine or lysine residue, located at the 6^{th} to 20^{th} position in the lasso peptide amino acid sequence, counting from its C terminus.

[0209] As described herein, a lasso peptide can have one or more structural features that contribute to the stability of the lariat-like topology of the lasso peptide. In some embodiments, the ring is formed around the tail, which is threaded through the ring, and a middle loop portion connects the ring and the tail portions of the lasso peptide. In some embodiments, one or more disulfide bond(s) are formed (i) between the ring and tail portions, (ii) between the ring and loop portions, (iii) between the loop and tail portions; (iv) between different amino acid residues of the tail portion, or (v) any combination of (i) through (iv), which contribute to hold the lariat-like topology in place and increase the stability of the lasso peptide. In particular embodiments, one or more disulfide bonds are formed between the loop and the ring. In particular embodiments, one or more disulfide bonds are formed between the ring and the tail. In particular embodiments, one or more disulfide bonds are formed between the tail and the loop. In particular embodiments, one or more disulfide bonds are formed between different amino acid residues of the tail.

[0210] In particular embodiments, at least one disulfide bond is formed between the loop and ring portions of a lasso peptide, and at least one disulfide bond is formed between the tail and ring portions of a lasso peptide. In particular embodiments, at least one disulfide bond is formed between the loop and ring portions of a lasso peptide, and at least one disulfide bond is formed between the loop and tail portions of a lasso peptide. In particular embodiments, at least one disulfide bond is formed between the loop and ring portions of a lasso peptide, and at least one disulfide bond is formed between the different amino acid residues of the tail portion of a lasso peptide. In particular embodiments, at least one disulfide bond is formed between the tail and ring portions of a lasso peptide, and at least one disulfide bond is formed between the loop and tail portions of a lasso peptide. In particular embodiments, at least one disulfide bond is formed between the tail and ring portions of a lasso peptide, and at least one disulfide bond is formed between the different amino acid residues of the tail portion of a lasso peptide. In particular embodiments, at least one disulfide bond is formed between the loop and tail portions of a lasso peptide, and at least one disulfide bond is formed between the different amino acid residues of the tail portion of a lasso peptide. In particular embodiments, at least one disulfide bond is formed between the loop and ring portions of a lasso peptide, and at least one disulfide bond is formed between the tail and ring portions of a lasso peptide, and at least one disulfide bond is formed between the loop and tail portions of a lasso peptide. In particular embodiments, at least one disulfide bond is formed between the loop and ring portions of a lasso peptide, and at least one disulfide bond is formed between the tail and ring portions of a lasso peptide, an and at least one disulfide bond is formed between the different amino acid residues of the tail portion of a lasso peptide. In particular embodiments, at least one disulfide bond is formed between the loop and ring portions of a lasso peptide, and at least one disulfide bond is formed between the loop and tail portions of a lasso peptide, an and at least one disulfide bond is formed between the different amino acid residues of the tail portion of a lasso peptide. In particular embodiments, at least one disulfide bond is formed between the tail and ring portions of a lasso peptide, and at least one disulfide bond is formed between the loop and tail portions of a lasso peptide, an and at least one disulfide bond is formed between the different amino acid residues of the tail portion of a lasso peptide. In particular embodiments, at least one disulfide bond is formed between the loop and ring portions of a lasso peptide, and at least one disulfide bond is formed between the tail and ring portions of a lasso peptide, and at least one disulfide bond is formed between the loop and tail portions of a lasso peptide, and at least one disulfide bond is formed between the different amino acid residues of the tail portion of a lasso peptide.

[0211] In some embodiments, structural features of a lasso peptide that contribute to its topological stability comprise bulky side chains of amino acid residues located on the ring, the tail and/or the loop portion(s) of the lasso peptide, and these bulky side chains create an steric effect that holds the lariat-like topology in place. In some embodiments, the tail portion comprises at least one amino acid residue having a sterically bulky side chain. In some embodiments, the tail portion comprises at least one amino acid residue having a sterically bulky side chain that is located approximate to where the tail threads through the ring. In some embodiments, the amino acid residue having the sterically bulky side chain is located on the tail portion and is about 1, 2 or 3 amino acid residue(s) away from where the tail threads through the plane of the ring.

[0212] In some embodiments, the loop portion comprises at least one amino acid residue having a sterically bulky side chain that is located approximate to where the tail threads through the plane of the ring. In some embodiments, the amino acid residue having the sterically bulky side chain is located on the loop portion and is about 1, 2 or 3 amino acid residue(s) away from where the tail threads through the plane of the ring.

[0213] In some embodiments, the loop portion and the tail portion each comprises at least one amino acid residue having a sterically bulky side chain, and the bulky side chains from the tail and the loop portions flank the plane of the ring to hold the tail in position with respect to the ring. In some embodiments, the loop portion and the tail portion each comprises at least one amino acid residues having a sterically bulky side chain that is about 1, 2, 3 amino acid residue(s) away from where the tail threads through the plane of the ring.

[0214] In some embodiments, structural features of a lasso peptide that contribute to its topological stability comprise the size of the ring and the number of amino acid residues in the ring that have a sterically bulky side chain. Without being bound by the theory, it is contemplated that the larger the size of the ring is, the greater number of amino acid residues having sterically bulky side chains are needed to maintain topological stability of a lasso peptide. In some embodiments, a lasso peptide has a 6-member ring, and about 0 to about 3 amino acid residues in the ring that has a bulky side chain. In some embodiments, a lasso peptide has a 7-member ring, and about 0 to about 3 amino acid residues in the ring that has a bulky side chain. In some embodiments, a lasso peptide has an 8-member ring, and about 0 to about 4 amino acid residues in the ring that has a bulky side chain. In some embodiments, a lasso peptide has a 9-member ring, and about 0 to about 4 amino acid residues in the ring that has a bulky side chain.

[0215] In various embodiments, the amino acid residues having a sterically bulky side chain are natural amino acids, such as one or more selected from Proline (Pro), Phenylalanine (Phe), Tryptophan (Trp), Methionine (Met), Tyrosine (Tyr), Lysine (Lys), Arginine (Arg), and Histidine (His) residues. In some embodiments, the amino acid residues having a sterically bulky side chain can be unusual or unnatural amino acids, such as citrulline (Cit), hydroxyproline (Hyp), norleucine (Nle), 3-nitrotyrosine, nitroarginine, omithine (Om), naphtylalanine (Nal), Abu, DAB, methionine sulfoxide or methionine sulfone, and those commercially available or known to one of ordinary skill in the art.

[0216] According to the present disclosure, the size of ring, loop and/or tail portions of a lasso peptide can be variable. In certain embodiments, the ring portion has about 6 to about 20 amino acid residues including the two ring-forming amino acid residues. In certain embodiments, the loop portion has more than 4 amino acid residues. In certain embodiments, the tail portion has more than 1 amino acid residue.

[0217] 5.3.2 Fusion Proteins

[0218] In one aspect, provided herein are fusion proteins comprising a lasso peptide component. In some embodiments, the fusion proteins are assembled into a phage, where the lasso peptide component is displayed on the surface of the capsid of the phage.

[0219] In various embodiments, the lasso peptide component of the fusion protein can be (i) an intact lasso peptide, (ii) a functional fragment of a lasso protein, (iii) a lasso precursor peptide; or (iv) a lasso core peptide. In some embodiments, the lasso peptide component of the fusion protein can undergo transition under a suitable condition among the different forms (i), (ii), (iii) and (iv).

[0220] In some embodiments, the lasso peptide component has the same amino acid sequence as a natural protein or peptide. In other embodiments, the lasso peptide component has an amino acid sequence that is a variant of a natural protein or peptide. Particularly, the lasso peptide component is a functional variant of a natural protein or peptide. Particularly, in some embodiments, the natural protein or peptide is a product of Gene A of a lasso peptide biosynthesis gene cluster.

[0221] In some embodiments, the lasso peptide component of the fusion protein has an amino acid sequence selected from the even numbers of SEQ ID NOS:1-2630. In some embodiments, the lasso peptide component of the fusion protein has an amino acid sequence that has greater than 30% sequence identity to any one of the even numbers of SEQ ID NOS:1-2630. Particularly, in some embodiments, the lasso peptide component of the fusion protein has an amino acid sequence that has greater than 40% sequence identity to any one of the even numbers of SEQ ID NOS:1-2630. In some embodiments, the lasso peptide component of the fusion protein has an amino acid sequence that has greater than 50% sequence identity to any one of the even numbers of SEQ ID NOS:1-2630. In some embodiments, the lasso peptide component of the fusion protein has an amino acid sequence that has greater than 60% sequence identity to any one of the even numbers of SEQ ID NOS:1-2630. In some embodiments, the lasso peptide component of the fusion protein has an amino acid sequence that has greater than 70% sequence identity to any one of the even numbers of SEQ ID NOS:1-2630. In some embodiments, the lasso peptide component of the fusion protein has an amino acid sequence that has greater than 80% sequence identity to any one of the even numbers of SEQ ID NOS:1-2630. In some embodiments, the lasso peptide component of the fusion protein has an amino acid sequence that has greater than 90% sequence identity to any one of the even numbers of SEQ ID NOS:1-2630. In some embodiments, the lasso peptide component of the fusion protein has an amino acid sequence that has greater than 95% sequence identity to any one of the even numbers of SEQ ID NOS:1-2630. In some embodiments, the lasso peptide component of the fusion protein has an amino acid sequence that has greater than 97% sequence identity to any one of the even numbers of SEQ ID NOS:1-2630. In some embodiments, the lasso peptide component of the fusion protein has an amino acid sequence that has greater than 99% sequence identity to any one of the even numbers of SEQ ID NOS:1-2630.

[0222] In some embodiments, the fusion protein further comprises a non-lasso component. Particularly, in some embodiments, the non-lasso component does not interfere with the functional and/or structural features of the lasso peptide component of the fusion protein. In some embodiments, the fusion protein retains one or more features of the lasso peptide component including (i) capability of transition from a lasso precursor peptide to a lasso core peptide when contacted with a lasso peptidase under a suitable condition; (ii) capability of transition from a lasso core peptide to an intact lasso peptide or a functional fragment of lasso peptide when in contact with a lasso cyclase; (iii) capability of binding to a target molecule of the lasso peptide or functional fragment of lasso peptide under a suitable condition; (iv) the lariat-like topology of an intact lasso peptide; (v) the lasso-related topologies of a functional fragment of lasso peptide. Exemplary suitable conditions include the condition for the lasso processing enzyme(s) to recognize its substrate and catalyze the reaction, or the presence of one or more cofactors of the lasso processing enzyme(s) such as RRE, or the condition suitable for a stand-alone lasso peptide (or functional fragment thereof) to bind to the target molecule, and those known to those of ordinary skill in the art.

[0223] In some embodiments, the fusion protein further comprises a phage structural protein or a functional variant thereof. In some embodiments, the phage structural protein is a coat protein which when assembled into the phage, is located on the surface of the phage capsid. In some embodiments, the orientation between the lasso peptide component and the phage coat protein in the fusion protein enables the lasso peptide component to be displayed on the surface of the phage.

[0224] According to the present disclosure, the phage coat protein can be derived from a phage that assembles new phage particles in the periplasmic space of the host cell, such as an M13 phage, a fl phage and a fd phage, and phages that assembles new phage particles in the cytosol of the host cell, such as a T4 phage, a T7 phage, a λ (lambda) phage, an MS2 phage, or a ΦX174 phage. Particularly, in some embodiments, the phage coat protein is derived from p3, p6, p7, p8 or p9 of filamentous phages. In other embodiments, the phage coat protein is derived from SOC (small outer capsid) protein or HOC (highly antigenic outer capsid) protein of a T4 phage, pX of a T7 phage, pD or pV of a λ (lambda) phage, MS2 Coat Protein (CP) of an MS2 phage, or the ΦX 174 major spike protein G of a ΦX 174 phage.

[0225] In some embodiments, the phage coat protein is a functional variant of a wild-type phage coat protein. Particularly, in some embodiments, the functional variant comprises one or more mutations to the wild-type phage coat protein, including but not limited to a deletion mutant (e.g., a truncation mutant), an insertion mutant, a missense mutant, a domain shuffling mutant, and a domain-swapping mutant.

[0226] In particular embodiments, the phage coat protein is derived from protein p3 of M13 phage. In some embodiment, the phage coat protein is a wild-type p3 protein. In other embodiments, the phage coat protein is a functional variant of the p3 protein that can be assembled onto the surface of a phage. Particularly, in some embodiments, the functional variant can be a truncated version of the p3 protein. In particular embodiments, the lasso peptide component is fused to the N terminus of the p3 protein or a functional variant thereof.

[0227] In particular embodiments, the phage coat protein is derived from a nonessential outer capsid protein of a phage, such as the SOC or HOC protein of the T4 phage, pX of a T7 phage, pD or pV of a λ (lambda) phage, MS2 Coat Protein (CP) of an MS2 phage, or the (DX 174 major spike protein G of a (DX 174 phage. In some embodiments, the phage coat protein is capable of assembly into a partially or fully assembled phage capsid.

[0228] In some embodiments, the lasso peptide component is fused to the non-lasso component of the fusion protein via a cleavable linker, such as an amino acid sequence comprising the cleavage site of a protease. Various cleavable linkers are known in the art. In some embodiments, when in contact with a suitable protease, the lasso peptide component is severed from the fusion protein. In particular embodiments, contacting a population of phage with a suitable protease can sever the lasso peptide component from the phage.

[0229] In some embodiments, the fusion protein further comprises a secretion signal that enables transportation of the fusion protein into a particular intracellular location or outside of a cell comprising the fusion protein. In some embodiments, the secretion signal directs the fusion protein to an intracellular location wherein the fusion protein is assembled into a phage. In some embodiments, a wild type version of the coat protein can compete with a fusion protein comprising the coat protein for assembly into a phage capsid. In some embodiments, a wild type version of the nonessential outer capsid protein can compete with a fusion protein comprising the nonessential outer capsid protein for assembly into a phage capsid.

[0230] In some embodiments, the secretion signal is a periplasmic secretion signal. In some embodiments, the secretion signal is an extracellular secretion signal. In some embodiments, the fusion protein comprising a periplasmic secretion signal is transported into the periplasmic space where the fusion protein is assembled into a phage. In some embodiments, the fusion protein is associated with the inner cytoplasmic membrane. In some embodiments, the lasso peptide component of the fusion protein is in the periplasmic space, wherein the lasso peptide component is processed to become an intact lasso peptide or a functional fragment of lasso peptide. In some embodiments, the secretion signal is removed from the fusion protein after the fusion protein arrives at the destination. In some embodiments, the secretion signal is fused at the N terminal end of the fusion protein. In some embodiments, the secretion signal is fused at the C-terminal end of the fusion protein. Exemplary periplasmic secretion signals that can be used in connection with the present disclosure include but are not limited to a periplasmic space-targeting signal sequence derived from TorA, PelB, OmpA, pIII, PhoA, DsbA, TolB, TorT, a substrate of the Type II Secretion System (T2SS), or a functional variant thereof. Exemplary extracellular secretion signals that can be used in connection with the present disclosure include but are not limited to an extracellular space targeting signal sequence derived from HlyA, a substrate of the Type 1 Secretion System (T1SS), or a functional variant thereof.

[0231] In another aspect, provided herein fusion proteins comprising at least one lasso peptide biosynthesis component. According to the present disclosure, the lasso peptide biosynthesis component can comprise (i) a lasso peptidase, (ii) a lasso cyclase, (iii) an RRE, or any combination of (i) to (iii). In some embodiments, the fusion protein comprises one or more of a lasso peptidase, a lasso cyclase and an RRE. In particular embodiments, the fusion protein comprise a lasso peptidase. In other embodiments, the fusion protein comprises a lasso cyclase. In other embodiments, the fusion protein comprises an RRE. In other embodiments, the fusion protein comprises a lasso peptidase fused with a lasso cyclase. In other embodiments, the fusion protein comprises a lasso peptidase fused with an RRE. In other embodiments, the fusion protein comprises a lasso cyclase fused with an RRE. In yet other embodiments, the fusion protein comprises a lasso peptidase, a lasso cyclase and an RRE fused together.

[0232] In some embodiments, the lasso peptide biosynthesis component has the same amino acid sequence as a natural protein or peptide. In other embodiments, the lasso peptide biosynthesis component has an amino acid sequence that is a variant of a natural protein or peptide. Particularly, the lasso peptide biosynthesis component is a functional variant of a natural protein or peptide. In some embodiments, the natural protein or peptide is a product of a gene of a lasso peptide biosynthesis gene cluster. Particularly, in some embodiments, the natural protein or peptide is a product of Gene B of a lasso peptide biosynthesis gene cluster. Particularly, in some embodiments, the natural protein or peptide is a product of Gene C of a lasso peptide biosynthesis gene cluster.

[0233] In some embodiments, the lasso peptide biosynthesis component of the fusion protein comprises the sequences of a lasso peptidase or a functional variant thereof. Particularly, the lasso peptide biosynthesis component of the fusion protein has an amino acid sequence selected from peptide Nos: 1316-2336. In some embodiments, the lasso peptide biosynthesis component of the fusion protein has an amino acid sequence that has greater than 30% sequence identity to any one of peptide Nos: 1316-2336. In some embodiments, the lasso peptide biosynthesis component of the fusion protein has an amino acid sequence that has greater than 40% sequence identity to any one of peptide Nos: 1316-2336. In some embodiments, the lasso peptide biosynthesis component of the fusion protein has an amino acid sequence that has greater than 50% sequence identity to any one of peptide Nos: 1316-2336. In some embodiments, the lasso peptide biosynthesis component of the fusion protein has an amino acid sequence that has greater than 60% sequence identity to any one of peptide Nos: 1316-2336. In some embodiments, the lasso peptide biosynthesis component of the fusion protein has an amino acid sequence that has greater than 70% sequence identity to any one of peptide Nos: 1316-2336. In some embodiments, the lasso peptide biosynthesis component of the fusion protein has an amino acid sequence that has greater than 80% sequence identity to any one of peptide Nos: 1316-2336. In some embodiments, the lasso peptide biosynthesis component of the fusion protein has an amino acid sequence that has greater than 90% sequence identity to any one of peptide Nos: 1316-2336. In some embodiments, the lasso peptide biosynthesis component of the fusion protein has an amino acid sequence that has greater than 95% sequence identity to any one of peptide Nos: 1316-2336. In some embodiments, the lasso peptide biosynthesis component of the fusion protein has an amino acid sequence that has greater than 99% sequence identity to any one of peptide Nos: 1316-2336.

[0234] In some embodiments, the lasso peptide biosynthesis component of the fusion protein comprises the sequences of a lasso cyclase or a functional variant thereof. Particularly, the lasso peptide biosynthesis component of the fusion protein has an amino acid sequence selected from peptide Nos: 2337-3761. In some embodiments, the lasso peptide biosynthesis component of the fusion protein has an amino acid sequence that has greater than 30% sequence identity to any one of peptide Nos: 2337-3761. In some embodiments, the lasso peptide biosynthesis component of the fusion protein has an amino acid sequence that has greater than 40% sequence identity to any one of peptide Nos: 2337-3761. In some embodiments, the lasso peptide biosynthesis component of the fusion protein has an amino acid sequence that has greater than 50% sequence identity to any one of peptide Nos: 2337-3761. In some embodiments, the lasso peptide biosynthesis component of the fusion protein has an amino acid sequence that has greater than 60% sequence identity to any one of peptide Nos: 2337-3761. In some embodiments, the lasso peptide biosynthesis component of the fusion protein has an amino acid sequence that has greater than 70% sequence identity to any one of peptide Nos: 2337-3761. In some embodiments, the lasso peptide biosynthesis component of the fusion protein has an amino acid sequence that has greater than 80% sequence identity to any one of peptide Nos: 2337-3761. In some embodiments, the lasso peptide biosynthesis component of the fusion protein has an amino acid sequence that has greater than 90% sequence identity to any one of peptide Nos: 2337-3761. In some embodiments, the lasso peptide biosynthesis component of the fusion protein has an amino acid sequence that has greater than 95% sequence identity to any one of peptide Nos: 2337-3761. In some embodiments, the lasso peptide biosynthesis component of the fusion protein has an amino acid sequence that has greater than 99% sequence identity to any one of peptide Nos: 2337-3761.

[0235] In some embodiments, the lasso peptide biosynthesis component of the fusion protein comprises the sequences of an RRE or a functional variant thereof. Particularly, the lasso peptide biosynthesis component of the fusion protein has an amino acid sequence selected from peptide Nos: 3762-4593. In some embodiments, the lasso peptide biosynthesis component of the fusion protein has an amino acid sequence that has greater than 30% sequence identity to any one of peptide Nos: 3762-4593. In some embodiments, the lasso peptide biosynthesis component of the fusion protein has an amino acid sequence that has greater than 40% sequence identity to any one of peptide Nos: 3762-4593. In some embodiments, the lasso peptide biosynthesis component of the fusion protein has an amino acid sequence that has greater than 50% sequence identity to any one of peptide Nos: 3762-4593. In some embodiments, the lasso peptide biosynthesis component of the fusion protein has an amino acid sequence that has greater than 60% sequence identity to any one of peptide Nos: 3762-4593. In some embodiments, the lasso peptide biosynthesis component of the fusion protein has an amino acid sequence that has greater than 70% sequence identity to any one of peptide Nos: 3762-4593. In some embodiments, the lasso peptide biosynthesis component of the fusion protein has an amino acid sequence that has greater than 80% sequence identity to any one of peptide Nos: 3762-4593. In some embodiments, the lasso peptide biosynthesis component of the fusion protein has an amino acid sequence that has greater than 90% sequence identity to any one of peptide Nos: 3762-4593. In some embodiments, the lasso peptide biosynthesis component of the fusion protein has an amino acid sequence that has greater than 95% sequence identity to any one of peptide Nos: 3762-4593. In some embodiments, the lasso peptide biosynthesis component of the fusion protein has an amino acid sequence that has greater than 99% sequence identity to any one of peptide Nos: 3762-4593.

[0236] In some embodiments, the lasso peptide biosynthesis component of the fusion protein comprises the sequences of a lasso peptidase and an RRE. Particularly, in some embodiments, the lasso peptide biosynthesis component of the fusion protein comprises the sequences of a functional variant of the lasso peptidase and an RRE. In some embodiments, the lasso peptide biosynthesis component of the fusion protein comprises the sequences of a lasso peptidase and a functional variant of an RRE. In some embodiments, the lasso peptide biosynthesis component of the fusion protein comprises the sequences of a functional variant of the lasso peptidase and a functional variant of the RRE. Particularly, the lasso peptide biosynthesis component of the fusion protein has an amino acid sequence selected from peptide Nos: 3768, 3770, 3793, 3811, 3818, 3851, 3855, 3887, 4004, 4018, 4045, 4076, 4132, 4150, 4167, 4168, 4225, 4262, 4379, 4414, 4499, 4504, 4507, 4512, 4517, 4518, 4529, 4532, 4542, 4559, 4561, or 4562. In some embodiments, the lasso peptide biosynthesis component of the fusion protein has an amino acid sequence that has greaterthan 30% sequence identity to any one of peptide Nos: 3768, 3770, 3793, 3811, 3818, 3851, 3855, 3887, 4004, 4018, 4045, 4076, 4132, 4150, 4167, 4168, 4225, 4262, 4379, 4414, 4499, 4504, 4507, 4512, 4517, 4518, 4529, 4532, 4542, 4559, 4561, or 4562. In some embodiments, the lasso peptide biosynthesis component of the fusion protein has an amino acid sequence that has greater than 40% sequence identity to any one of peptide Nos: 3768, 3770, 3793, 3811, 3818, 3851, 3855, 3887, 4004, 4018, 4045, 4076, 4132, 4150, 4167, 4168, 4225, 4262, 4379, 4414, 4499, 4504, 4507, 4512, 4517, 4518, 4529, 4532, 4542, 4559, 4561, or 4562. In some embodiments, the lasso peptide biosynthesis component of the fusion protein has an amino acid sequence that has greater than 50% sequence identity to any one of peptide Nos: 3768, 3770, 3793, 3811, 3818, 3851, 3855, 3887, 4004, 4018, 4045, 4076, 4132, 4150, 4167, 4168, 4225, 4262, 4379, 4414, 4499, 4504, 4507, 4512, 4517, 4518, 4529, 4532, 4542, 4559, 4561, or 4562. In some embodiments, the lasso peptide biosynthesis component of the fusion protein has an amino acid sequence that has greater than 60% sequence identity to any one of peptide Nos: 3768, 3770, 3793, 3811, 3818, 3851, 3855, 3887, 4004, 4018, 4045, 4076, 4132, 4150, 4167, 4168, 4225, 4262, 4379, 4414, 4499, 4504, 4507, 4512, 4517, 4518, 4529, 4532, 4542, 4559, 4561, or 4562. In some embodiments, the lasso peptide biosynthesis component of the fusion protein has an amino acid sequence that has greater than 70% sequence identity to any one ofpeptide Nos: 3768, 3770, 3793, 3811, 3818, 3851, 3855, 3887, 4004, 4018, 4045, 4076, 4132, 4150, 4167, 4168, 4225, 4262, 4379, 4414, 4499, 4504, 4507, 4512, 4517, 4518, 4529, 4532, 4542, 4559, 4561, or 4562. In some embodiments, the lasso peptide biosynthesis component of the fusion protein has an amino acid sequence that has greater than 80% sequence identity to any one ofpeptide Nos: 3768, 3770, 3793, 3811, 3818, 3851, 3855, 3887, 4004, 4018, 4045, 4076, 4132, 4150, 4167, 4168, 4225, 4262, 4379, 4414, 4499, 4504, 4507, 4512, 4517, 4518, 4529, 4532, 4542, 4559, 4561, or 4562. In some embodiments, the lasso peptide biosynthesis component of the fusion protein has an amino acid sequence that has greater than 90% sequence identity to any one ofpeptide Nos: 3768, 3770, 3793, 3811, 3818, 3851, 3855, 3887, 4004, 4018, 4045, 4076, 4132, 4150, 4167, 4168, 4225, 4262, 4379, 4414, 4499, 4504, 4507, 4512, 4517, 4518, 4529, 4532, 4542, 4559, 4561, or 4562. In some embodiments, the lasso peptide biosynthesis component of the fusion protein has an amino acid sequence that has greater than 95% sequence identity to any one ofpeptide Nos: 3768, 3770, 3793, 3811, 3818, 3851, 3855, 3887, 4004, 4018, 4045, 4076, 4132, 4150, 4167, 4168, 4225, 4262, 4379, 4414, 4499, 4504, 4507, 4512, 4517, 4518, 4529, 4532, 4542, 4559, 4561, or 4562. In some embodiments, the lasso peptide biosynthesis component of the fusion protein has an amino acid sequence that has greaterthan 99% sequence identity to any one of peptide Nos: 3768, 3770, 3793, 3811, 3818, 3851, 3855, 3887, 4004, 4018, 4045, 4076, 4132, 4150, 4167, 4168, 4225, 4262, 4379, 4414, 4499, 4504, 4507, 4512, 4517, 4518, 4529, 4532, 4542, 4559, 4561, or 4562.

[0237] In some embodiments, the lasso peptide biosynthesis component of the fusion protein comprises the sequences of a lasso cyclase and an RRE. Particularly, in some embodiments, the lasso peptide biosynthesis component of the fusion protein comprises the sequences of a functional variant of the lasso cyclase and an RRE. In some embodiments, the lasso peptide biosynthesis component of the fusion protein comprises the sequences of a lasso cyclase and a functional variant of an RRE. In some embodiments, the lasso peptide biosynthesis component of the fusion protein comprises the sequences of a functional variant of the lasso cyclase and a functional variant of the RRE. Particularly, the lasso peptide biosynthesis component of the fusion protein has an amino acid sequence selected from peptide NO: 2504 or 3608. In some embodiments, the lasso peptide biosynthesis component of the fusion protein has an amino acid sequence that has greater than 30% sequence identity to any one of peptide Nos: 2504 or 3608. In some embodiments, the lasso peptide biosynthesis component of the fusion protein has an amino acid sequence that has greater than 40% sequence identity to any one of peptide Nos: 2504 or 3608. In some embodiments, the lasso peptide biosynthesis component of the fusion protein has an amino acid sequence that has greater than 50% sequence identity to any one of peptide Nos: 2504 or 3608. In some embodiments, the lasso peptide biosynthesis component of the fusion protein has an amino acid sequence that has greater than 60% sequence identity to any one of peptide Nos: 2504 or 3608. In some embodiments, the lasso peptide biosynthesis component of the fusion protein has an amino acid sequence that has greater than 70% sequence identity to any one of peptide Nos: 2504 or 3608. In some embodiments, the lasso peptide biosynthesis component of the fusion protein has an amino acid sequence that has greater than 80% sequence identity to any one of peptide Nos: 2504 or 3608. In some embodiments, the lasso peptide biosynthesis component of the fusion protein has an amino acid sequence that has greater than 90% sequence identity to any one of peptide Nos: 2504 or 3608. In some embodiments, the lasso peptide biosynthesis component of the fusion protein has an amino acid sequence that has greater than 95% sequence identity to any one of peptide Nos: 2504 or 3608. In some embodiments, the lasso peptide biosynthesis component of the fusion protein has an amino acid sequence that has greater than 99% sequence identity to any one of peptide Nos: 2504 or 3608.

[0238] In some embodiments, the lasso peptide biosynthesis component of the fusion protein comprises the sequences of a lasso peptidase and a lasso cyclase. Particularly, in some embodiments, the lasso peptide biosynthesis component of the fusion protein comprises the sequences of a functional variant of the lasso peptidase and a lasso cyclase. In some embodiments, the lasso peptide biosynthesis component of the fusion protein comprises the sequences of a lasso peptidase and a functional variant of a lasso cyclase. In some embodiments, the lasso peptide biosynthesis component of the fusion protein comprises the sequences of a functional variant of the lasso peptidase and a functional variant of the lasso cyclase. Particularly, the lasso peptide biosynthesis component of the fusion protein has an amino acid of peptide NO: 2903. In some embodiments, the lasso peptide biosynthesis component of the fusion protein has an amino acid sequence that has greater than 30% sequence identity to peptide No: 2903. In some embodiments, the lasso peptide biosynthesis component of the fusion protein has an amino acid sequence that has greater than 40% sequence identity to peptide No: 2903. In some embodiments, the lasso peptide biosynthesis component of the fusion protein has an amino acid sequence that has greater than 50% sequence identity to peptide No: 2903. In some embodiments, the lasso peptide biosynthesis component of the fusion protein has an amino acid sequence that has greater than 60% sequence identity to peptide No: 2903. In some embodiments, the lasso peptide biosynthesis component of the fusion protein has an amino acid sequence that has greater than 70% sequence identity to peptide No: 2903. In some embodiments, the lasso peptide biosynthesis component of the fusion protein has an amino acid sequence that has greater than 80% sequence identity to peptide No: 2903. In some embodiments, the lasso peptide biosynthesis component of the fusion protein has an amino acid sequence that has greater than 90% sequence identity to peptide No: 2903. In some embodiments, the lasso peptide biosynthesis component of the fusion protein has an amino acid sequence that has greater than 95% sequence identity to peptide No: 2903. In some embodiments, the lasso peptide biosynthesis component of the fusion protein has an amino acid sequence that has greater than 99% sequence identity to peptide No: 2903.

[0239] In some embodiments, the lasso peptide biosynthesis component of the fusion protein comprises the sequences of a lasso peptidase, a lasso cyclase, and an RRE. In some embodiments, the lasso peptide biosynthesis component of the fusion protein comprises the sequences of a functional variant of a lasso peptidase, a lasso cyclase, and an RRE. In some embodiments, the lasso peptide biosynthesis component of the fusion protein comprises the sequences of a lasso peptidase, a functional variant of a lasso cyclase, and an RRE. In some embodiments, the lasso peptide biosynthesis component of the fusion protein comprises the sequences of a lasso peptidase, a lasso cyclase, and a functional variant of an RRE. In some embodiments, the lasso peptide biosynthesis component of the fusion protein comprises the sequences of a functional variant of a lasso peptidase, a functional variant of a lasso cyclase, and an RRE. In some embodiments, the lasso peptide biosynthesis component of the fusion protein comprises the sequences of a functional variant of a lasso peptidase, a lasso cyclase, and a functional variant of an RRE. In some embodiments, the lasso peptide biosynthesis component of the fusion protein comprises the sequences of a lasso peptidase, a functional variant of a lasso cyclase, and a functional variant of an RRE. In some embodiments, the lasso peptide biosynthesis component of the fusion protein comprises the sequences of a functional variant of a lasso peptidase, a functional variant of a lasso cyclase, and a functional variant of an RRE.

[0240] In some embodiments, at least two of the lasso peptide biosynthesis components are fused via a cleavable linker, which upon cleavage, sever the at least two lasso peptide biosynthesis components from each other.

[0241] In some embodiments, the fusion protein comprising at least one lasso peptide biosynthesis component fused to (i) a secretion signal, or (ii) a purification tag. In some embodiments, the secretion signal is a periplasmic secretion signal. In particular embodiments, the periplasmic signal is a periplasmic space targeting signal sequence derived from TorA, PelB, OmpA, pIII, PhoA, DsbA, TolB, TorT, a substrate of the Type II Secretion System (T2SS), or a functional variant thereof. In particular embodiments, a fusion protein comprising at least one lasso peptide biosynthesis component and a periplasmic secretion signal is transported into the periplasmic space of a cell containing the fusion protein. In other embodiments, the secretion signal is an extracellular secretion signal. In particular embodiment, the extracellular signal is an extracellular space-targeting signal sequence derived from HlyA, a substrate of the Type 1 Secretion System (T1SS), or a functional variant thereof. In particular embodiments, a fusion protein comprising at least one lasso peptide biosynthesis component and an extracellular secretion signal is transported outside a cell containing the fusion protein. In some embodiments, the secretion signal is located at the N terminal end of the fusion protein. In other embodiments, the secretion signal is located at the C terminal end of the fusion protein.

[0242] In various embodiments, the fusion protein comprising at least one lasso peptide biosynthesis component fused to a purification tag. Any peptidic purification tag known in the art may be used in connection with the present disclosure, such as but not limited to, a His₆ tag, a FLAG tag, a streptavidin tag, etc. In some embodiments, fusion between the lasso peptide biosynthesis component and the purification tag is via a cleavable linker, which upon cleavage severs the biosynthesis component from the purification tag.

[0243] In some embodiments, the fusion protein comprising the lasso peptide biosynthesis component retains functionality of the lasso peptide biosynthesis. For example, a fusion protein comprising a lasso peptidase as provided herein is capable of processing a lasso precursor peptide into a lasso core peptide when contacted with the lasso precursor peptide under a suitable condition. For example, a fusion protein comprising a lasso cyclase as provided herein is capable of processing a lasso core peptide into a lasso peptide or a functional fragment of lasso peptide when contacted with the lasso core peptide under a suitable condition. For example, a fusion protein comprising a lasso peptidase and a lasso cyclase as provided herein is capable of processing a lasso precursor peptide into a lasso peptide or a functional fragment of lasso peptide when contacted with the lasso precursor peptide under a suitable condition. For example, a fusion protein comprising an RRE can function as a cofactor of a lasso peptidase or a lasso cyclase under a suitable condition.

[0244] In some embodiments, a fusion protein comprising at least one lasso peptide biosynthesis component is capable of processing a lasso precursor peptide into a lasso peptide or a functional fragment of lasso peptide in the periplasmic space of a cell comprising the fusion protein. In some embodiments, a fusion protein comprising at least one lasso peptide biosynthesis component is capable of processing a lasso core peptide into a lasso peptide or a functional fragment of lasso peptide in the periplasmic space of a cell comprising the fusion protein. In other embodiments, a fusion protein comprising at least one lasso peptide biosynthesis component is capable of processing a lasso precursor peptide displayed on a phage into a lasso peptide or a functional fragment of a lasso peptide. In other embodiments, a fusion protein comprising at least one lasso peptide biosynthesis component is capable of processing a lasso core peptide displayed on a phage into a lasso peptide or a functional fragment of a lasso peptide.

[0245] According to the present disclosure, the fusion protein described herein can be produced recombinantly. For example, one or more nucleic acid molecules encoding the fusion protein can be introduced into cells of a microbial strain that expresses the fusion protein. Particularly, in some embodiments, the expressed fusion protein can be isolated or purified using methods known in the art. In some embodiments, the microbial strain used to produce the fusion protein is a microbial organism known to be applicable to fermentation processes. Various microbial strains suitable for this purpose are known in the art, and some exemplary strains are Escherichia coli, Klebsiella oxytoca, Anaerobiospirillum succiniciproducens, Actinobacillus succinogenes, Mannheimia succiniciproducens, Rhizobium etli, Bacillus subtilis, Corynebacterium glutamicum, Gluconobacter oxydans, Zymomonas mobilis, Lactococcus lactis, Lactobacillus plantarum, Streptomyces coelicolor, Clostridium acetobutylicum, Vibrio natriegens, Pseudomonas fluorescens, and Pseudomonas putida. Exemplary yeasts or fungi include species selected from Saccharomyces cerevisiae, Schizosaccharomyces pombe, Kluyveromyces lactis, Kluyveromyces marxianus, Aspergillus terreus, Aspergillus niger and Pichia pastoris. E. coli is a particularly useful host organism since it is a well characterized microbial organism suitable for genetic engineering. Other particularly useful host organisms include yeast such as Saccharomyces cerevisiae.

[0246] In some embodiments, one or more fusion proteins as provided herein are expressed in a microbial cell, followed by the assembly into a phage. In some embodiments, the microbial cell is a host of the phage. In some embodiments, endogenous mechanism (e.g., endogenous proteins and/or cofactors) of the host cell enables the expression and assembly into a phage of the fusion protein. In other embodiments, exogenous mechanisms (e.g., exogenous genes) are introduced into the host cell to facilitate the expression and assembly into a phage of the fusion protein. In some embodiments, the host cell of the phage is also a microbial organism known to be applicable to fermentation processes as described herein. In some embodiments, the microbial cell is a bacterial cell or an archaeal cell. In some embodiments, the microbial cell is a natural host for the phage. Exemplary microbial organisms that can be used in connection with the present disclosure include but are not limited to Escherichia coli, Klebsiella oxytoca, Anaerobiospirillum succiniciproducens, Actinobacillus succinogenes, Mannheimia succiniciproducens, Rhizobium etli, Bacillus subtilis, Corynebacterium glutamicum, Gluconobacter oxydans, Zymomonas mobilis, Lactococcus lactis, Lactobacillus plantarum, Streptomyces coelicolor, Clostridium acetobutylicum, Vibrio natriegens, Pseudomonas fluorescens, and Pseudomonas putida. E. coli is a particularly useful host organism since it is a well characterized microbial organism suitable for genetic engineering.

[0247] 5.3.3 Nucleic Acids

[0248] In another aspect, provided herein are nucleic acid molecules encoding the fusion proteins as described herein and systems comprising one or more such nucleic acid molecules. Particularly, in some embodiments, systems comprising one or more nucleic acid molecules encoding the fusion proteins as described herein can be used to generate a phage display library of lasso peptides.

[0249] In some embodiments, provided herein is a nucleic acid molecule that encodes a fusion protein comprising a lasso peptide fragment. In some embodiments, the nucleic acid molecule encodes a fusion protein comprising the lasso peptide fragment fused to a phage coat protein. As described herein, the phage coat protein can be derived from a phage that assembles new phage particles in the periplasmic space of the host cell, such as an M13 phage, a fl phage or a fd phage, and phages that assembles new phage particles in the cytosol of the host cell, such as a T4 phage, a T7 phage, a λ (lambda) phage, an MS2 phage or a ΦX 174 phage. Particularly, in some embodiments, the phage coat protein is derived from p3, p6, p7, p8 or p9 of filamentous phages. In other embodiments, the phage coat protein is derived from SOC (small outer capsid) protein or HOC (highly antigenic outer capsid) protein of a T4 phage, pX of a T7 phage, pD or pV of a λ (lambda) phage, MS2 Coat Protein (CP) of an MS2 phage, or the Φ174 major spike protein G of a Φ174 phage.

[0250] In some embodiments, the nucleic acid molecule comprises a sequence encoding a phage coat protein, or a function variant thereof. In some embodiments, the functional variant of the phage coat protein has a different amino acid sequence as compared to the wild-type coat protein, but retain the functionality of the phage coat protein of assembly into the phage. In some embodiments, the sequence encoding the phage coat protein in the nucleic acid molecule contains one or more point mutations as compared to the wild-type sequence encoding the phage coat protein. In some embodiments, the sequence encoding the phage coat protein in the nucleic acid molecule comprises one or more deletion mutations as compared to the wild-type sequence encoding the phage coat protein. In some embodiments, the sequence encoding the phage coat protein in the second nucleic acid molecule comprises one or more insertion mutations as compared to the wild-type sequence encoding the phage coat protein. In some embodiments, the sequence encoding the phage coat protein in the nucleic acid molecule comprises one or more missense mutations as compared to the wild-type sequence encoding the phage coat protein. In some embodiments, the nucleic acid molecule comprises a truncated open reading frame that encodes a truncated version of the phage coat protein. In some embodiments, the truncation is at the 5′ end of the open reading frame. In other embodiments, the truncation is at the 3′ end of the open reading frame. In some embodiments, the nucleic acid encodes a domain shuffling mutant of the phage coat protein. In some embodiments, the second nucleic acid encodes a domain swapping mutant of the phage coat protein.

[0251] In some embodiments, the nucleic acid molecule further comprises a sequence encoding for a lasso peptide component. According to the present disclosure, the lasso peptide component can be (i) a lasso peptide; (ii) a functional fragment of a lasso peptide; (iii) a lasso precursor peptide, or (iv) a lasso core peptide. In some embodiments, the nucleic acid molecule comprises a sequence derived from Gene A of a lasso peptide biosynthesis gene cluster. Particularly, in some embodiments, the nucleic acid molecule comprises a sequence having the same sequence of a Gene A, or a fragment thereof. For example, in some embodiments, the fragment of Gene A comprised in the nucleic acid molecule is the open reading frame of Gene A. In other embodiments, the nucleic acid molecule comprises a variant of Gene A sequence, or a fragment thereof. For example, one or more mutations can be introduced into the Gene A sequence, or into a fragment of the Gene A sequence. In some embodiments, a variant of the Gene A sequence or a fragment of Gene A sequence (e.g. the ORF) has greater than 30% sequence identity to the Gene A sequence or the fragment of Gene A sequence (e.g., the ORF). The mutations can be introduced using various methods as described herein or known in the art.

[0252] Particularly, in some embodiments, the nucleic acid molecule comprises a sequence selected from any one of the odd numbers of SEQ ID NOS:1-2630. In some embodiments, the nucleic acid molecule comprises a sequence that has greater than 30% sequence identity to any one of the odd numbers of SEQ ID NOS:1-2630. In some embodiments, the nucleic acid molecule comprises a sequence that has greater than 40% sequence identity to any one of the odd numbers of SEQ ID NOS:1-2630. In some embodiments, the nucleic acid molecule comprises a sequence that has greater than 50% sequence identity to any one of the odd numbers of SEQ ID NOS:1-2630. In some embodiments, the nucleic acid molecule comprises a sequence that has greater than 60% sequence identity to any one of the odd numbers of SEQ ID NOS:1-2630. In some embodiments, the nucleic acid molecule comprises a sequence that has greater than 70% sequence identity to any one of the odd numbers of SEQ ID NOS:1-2630. In some embodiments, the nucleic acid molecule comprises a sequence that has greater than 80% sequence identity to any one of the odd numbers of SEQ ID NOS:1-2630. In some embodiments, the nucleic acid molecule comprises a sequence that has greater than 90% sequence identity to any one of the odd numbers of SEQ ID NOS:1-2630. In some embodiments, the nucleic acid molecule comprises a sequence that has greater than 95% sequence identity to any one of the odd numbers of SEQ ID NOS:1-2630. In some embodiments, the nucleic acid molecule comprises a sequence that has greater than 99% sequence identity to any one of the odd numbers of SEQ ID NOS:1-2630.

[0253] In some embodiments, the nucleic acid molecule further comprises a sequence encoding a secretion signal peptide. As provided herein, in some embodiments, the secretion signal peptide is a periplasmic secretion signal. In other embodiments, the secretion signal peptide is an extracellular secretion signal. In some embodiments, the sequence encoding the secretion signal peptide is located upstream to the sequences encoding the coat protein and the lasso peptide component. In some embodiments, the sequence encoding the secretion signal peptide is located downstream to the sequences encoding the coat protein and the lasso peptide component.

[0254] In some embodiments, the nucleic acid molecule further comprises one or more sequence encoding for a peptidic linker sequence. In some embodiments, the peptidic linker sequence is located between the lasso peptide fragment and the phage coat protein. In some embodiments, the peptidic linker sequence is located between the secretion signal peptide and the lasso peptide component. In some embodiments, the peptidic linker sequence is located between the secretion signal and the phage coat protein. In some embodiments, the peptidic linker is a cleavable linker. In some embodiments, the peptidic linker comprises cleavage site recognized and cleaved by a protease.

[0255] In some embodiments, the sequences encoding different components of the fusion protein are fused in frame with one another to code for a fusion protein comprising the different components. In some embodiments, the sequences coding for different components of the fusion protein are operably linked to the same expression regulatory element. In some embodiments, the sequences coding for different components of the fusion protein are operably linked to at least two different expression regulatory elements. In some embodiments, the expression regulatory element is a cis-regulatory element (CRE) of a gene. In some embodiments, the expression regulatory element is a promoter sequence. In some embodiments, the expression regulator element is an enhancer sequence. In some embodiments, the expression regulator element is an attenuator sequence.

[0256] In some embodiments, the nucleic acid molecule encoding the fusion protein comprising a lasso peptide component further comprises a replication origin sequence, such that the nucleic acid molecule can be replicated inside a cell. In some embodiments, the nucleic acid molecule encoding the fusion protein comprising a lasso peptide component further comprises a packaging signal sequence that enables packaging of the nucleic acid molecule into a phage. Various packaging signal sequences in genomes of phages can be used in connection with the present disclosure, such as those described in Fujisawa et al. Genes to Cells (1997) 2, 537-545. Various packaging signal sequences in genomes of other viruses can also be used in connection with the present disclosure, such as those described in Sun et al., Curr. Opin. Struct. Biol. 2010 February; 20(1): 114-120. In some embodiments, the replication origin sequence also serves as the packaging signal, such as the replication origin sequence of the fl phage. In some embodiments, the nucleic acid molecule encoding the fusion protein comprising a lasso peptide component is part of a cloning vector. In particular embodiments, the nucleic acid molecule encoding the fusion protein comprising a lasso peptide component is part of a plasmid. In particular embodiments, the nucleic acid molecule encoding the fusion protein comprising a lasso peptide component is part of a phagemid.

[0257] In particular embodiments, the nucleic acid molecule encoding the fusion protein is part of a phage genome. In some embodiments, the nucleic acid molecule encoding the fusion protein is configured to undergo homologous recombination to insert the coding sequence for the fusion protein into a phage genome sequence.

[0258] In some embodiments, provided herein is a nucleic acid molecule that encodes a fusion protein comprising a lasso peptide biosynthesis component. In some embodiments, the nucleic acid molecule encodes a fusion protein comprising the lasso peptide biosynthesis component fused to a (i) secretion signal, or (ii) a purification tag. The secretion signal or purification tag can be any secretion signal or purification tag described herein. In some embodiments, the lasso peptide biosynthesis component comprises one or more of a lasso peptidase, a lasso cyclase and an RRE.

[0259] In some embodiments, the nucleic acid comprises one or more sequence(s) derived from one or more gene(s) of a lasso peptide biosynthesis gene cluster. Particularly, in some embodiments, the nucleic acid comprises a sequence derived from Gene B of a lasso peptide biosynthesis gene cluster. In some embodiments, the nucleic acid comprises a sequence derived from Gene C of a lasso peptide biosynthesis gene cluster. In some embodiments, the nucleic acid comprises a sequence derived from Gene B and a sequence derived from Gene C of a lasso peptide biosynthesis gene cluster. In some embodiments, the nucleic acid comprises a sequence derived from a lasso peptide biosynthesis gene cluster that encodes an RRE. In some embodiments, the nucleic acid comprises a sequence derived from Gene B and a sequence derived from a lasso peptide biosynthesis gene cluster that encodes an RRE. In some embodiments, the nucleic acid comprises a sequence derived from Gene C and a sequence derived from a lasso peptide biosynthesis gene cluster that encodes an RRE. In some embodiments, the nucleic acid comprises a sequence derived from Gene B, a sequence derived from Gene C, and a sequence derived from a lasso peptide biosynthesis gene cluster that encodes an RRE.

[0260] According to the present disclosure, the nucleic acid molecule encoding a fusion protein comprising a lasso peptide biosynthesis component may comprises a sequence that is the same as a sequence of the lasso peptide biosynthesis gene cluster. Alternatively, the nucleic acid molecule encoding a fusion protein comprising a lasso peptide biosynthesis component may comprise a sequence that is a variant of a sequence of the lasso peptide biosynthesis gene cluster. In some embodiments, a variant of a sequence of the lasso peptide biosynthesis gene cluster has a different nucleic acid sequence as compared to the wild-type gene sequence, but still encodes a functional protein product of the lasso peptide biosynthesis gene cluster. In some embodiments, a nucleic acid variant has greater than 30% sequence identity to the wild-type gene sequence.

[0261] Particularly, in some embodiments, the nucleic acid molecule encoding a fusion protein comprising a lasso peptide biosynthesis component comprises a sequence encoding a lasso peptidase.

[0262] Particularly, in some embodiments, the nucleic acid molecule encoding a fusion protein comprising a lasso peptide biosynthesis component comprises a sequence encoding a lasso peptidase and a sequence encoding a lasso cyclase. In some embodiments, the nucleic acid molecule encoding a fusion protein comprising a lasso peptide biosynthesis component comprises a sequence encoding a lasso peptidase and a sequence encoding an RRE. In some embodiments, the nucleic acid molecule encoding a fusion protein comprising a lasso peptide biosynthesis component comprises a sequence encoding a lasso cyclase and a sequence encoding an RRE. In some embodiments, the nucleic acid molecule encoding a fusion protein comprising a lasso peptide biosynthesis component comprises a sequence encoding a lasso peptidase, a sequence encoding a lasso cyclase, and a sequence encoding an RRE.

[0263] Particularly, in some embodiment, the nucleic acid molecule encodes a fusion protein comprising a lasso peptidase and a lasso cyclase. In some embodiment, the nucleic acid molecule encodes a fusion protein comprising a lasso peptidase and an RRE. In some embodiment, the nucleic acid molecule encodes a fusion protein comprising a lasso cyclase and an RRE. In some embodiment, the nucleic acid molecule encodes a fusion protein comprising a lasso peptidase, a lasso cyclase, and an RRE. In these embodiments, the nucleic acid sequences encoding the two or more lasso peptide biosynthesis components can be any of the corresponding coding sequences disclosed herein.

[0264] Alternatively, in some embodiments, the nucleic acid molecule encodes one or more fusion proteins each comprises a lasso peptide biosynthesis component. Particularly, in some embodiments, the nucleic acid molecule encodes two fusion proteins, and one fusion protein comprises a lasso peptidase, and the other fusion protein comprises a lasso cyclase. Particularly, in some embodiments, the nucleic acid molecule encodes two fusion proteins, and one fusion protein comprises a lasso peptidase, and the other fusion protein comprises an RRE. Particularly, in some embodiments, the nucleic acid molecule encodes two fusion proteins, and one fusion protein comprises a lasso cyclase, and the other fusion protein comprises an RRE. Particularly, in some embodiments, the nucleic acid molecule encodes three fusion proteins, and the first fusion protein comprises a lasso peptidase, the second fusion protein comprises a lasso cyclase, and the third fusion protein comprises an RRE. In these embodiments, the nucleic acid sequences encoding the two or more lasso peptide biosynthesis components can be any of the corresponding coding sequences disclosed herein.

[0265] In some embodiments, the nucleic acid molecule further comprises a sequence encoding a secretion signal peptide. As provided herein, in some embodiments, the secretion signal peptide is a periplasmic secretion signal. In other embodiments, the secretion signal peptide is an extracellular secretion signal. In some embodiments, the sequence encoding the secretion signal peptide is located upstream to the sequences encoding the lasso peptide biosynthesis component. In some embodiments, the sequence encoding the secretion signal peptide is located downstream to the sequences encoding the lasso peptide biosynthesis component.

[0266] In some embodiments, the nucleic acid molecule further comprises one or more sequence encoding for a peptidic linker sequence. In some embodiments, the peptidic linker sequence is located between the lasso peptide biosynthesis component and the secretion signal peptide. In some embodiments, the peptidic linker sequence is located between two or more of lasso peptide biosynthesis components comprised with the fusion protein. In some embodiments, the peptidic linker is a cleavable linker. In some embodiments, the peptidic linker comprises cleavage site recognized and cleaved by a protease.

[0267] In some embodiments, the sequences encoding different components of the fusion protein and fused in flame with one another to code for a fusion protein comprising the different components (e.g., a fusion protein comprising a secretion signal peptide, a lasso peptidase and a lasso cyclase). In other embodiments, the sequences encoding different components of the fusion protein forms multiple open reading frames, each encoding a different protein or peptide. For example, in some embodiments, the nucleic acid molecule comprises three open reading flames, encoding a lasso peptidase, a lasso cyclase and an RRE, respectively. Particularly, in some embodiments, the nucleic acid molecule comprises three open reading frames, encoding a lasso peptidase fused to a secretion signal, a lasso cyclase fused to a secretion signal, and an RRE fused to a secretion signal, respectively. Particularly, in some embodiments, the nucleic acid molecule comprises three open reading frames, encoding a lasso peptidase fused to a purification tag, a lasso cyclase fused to a purification tag, and an RRE fused to a purification tag, respectively.

[0268] In some embodiments, the sequences coding for different components of the fusion protein are operably linked to the same expression regulatory element. In some embodiments, the sequences coding for different components of the fusion protein are operably linked to at least two different expression regulatory elements. In some embodiments, the expression regulatory element is a cis-regulatory element (CRE) of a gene. In some embodiments, the expression regulatory element is a promoter sequence. In some embodiments, the expression regulator element is an enhancer sequence. In some embodiments, the expression regulator element is an attenuator sequence.

[0269] In some embodiments, the nucleic acid molecule encoding the fusion protein comprising a lasso peptide biosynthesis component further comprises a replication origin sequence, such that the nucleic acid molecule can be replicated inside a cell. In some embodiments, the nucleic acid molecule encoding the fusion protein comprising a lasso peptide biosynthesis component is part of a cloning vector. In particular embodiments, the nucleic acid molecule encoding the fusion protein comprising a lasso peptide biosynthesis component is part of a plasmid.

[0270] In some embodiments, the nucleic acid sequences encoding the lasso peptide component and/or the lasso peptide biosynthesis component are derived from one or more naturally-existing lasso peptide biosynthetic gene clusters. In some embodiments, the coding sequences can be identified using the methods and systems described herein (e.g., in the section titled ‘Genomic Mining Tools for Genes coding Natural Lasso Peptides’). In some embodiments, a coding sequence can be mutated using methods described herein (e.g. in the section titled “Diversifying Lasso Peptides”).

[0271] 5.3.4 Systems for Producing Phage Display Libraries

[0272] In one aspect, provided herein are also systems for producing phage display libraries of lasso peptides. In some embodiments, the system comprises one or more of the nucleic acid molecules provided herein. In some embodiments, the system further comprises components for expression of proteins encoded by the nucleic acid molecule. In some embodiments, the system further comprises components for assembling at least one of the expressed proteins into a phage displaying a lasso peptide component. In some embodiments, the system further comprises components for processing the lasso peptide component in the form of a lasso precursor peptide into a matured lasso peptide or functional fragment of lasso peptide. In some embodiments, the system further comprises components for processing the lasso peptide component in the form of a lasso core peptide into a matured lasso peptide or functional fragment of lasso peptide.

[0273] Particularly, in some embodiments, the system further comprises a cell. In some embodiments, the cell is capable of expressing one or more protein products encoded by the nucleic acid molecules of the system. In some embodiments, the cell is also capable of assembling one or more protein products encoded by the nucleic acid molecules of the system into a phage displaying a lasso peptide component. In some embodiments, the cell is also capable of processing a lasso peptide component in the form of a lasso precursor peptide into a matured lasso peptide or functional fragment of lasso peptide. In some embodiments, the cell is also capable of processing a lasso peptide component in the form of a lasso core peptide into a matured lasso peptide or functional fragment of lasso peptide.

[0274] In some embodiments, the system further comprises a cell-free biosynthesis system comprising a cell-free biosynthesis reaction mixture. In some embodiments, the cell-flee biosynthesis system is capable of expressing one or more protein products encoded by the nucleic acid molecules of the system. In some embodiments, the cell-free biosynthesis system is also capable of assembling one or more protein products encoded by the nucleic acid molecules of the system into a phage displaying a lasso peptide component. In some embodiments, the cell-free biosynthesis system is also capable of processing a lasso peptide component in the form of a lasso precursor peptide into a matured lasso peptide or functional fragment of lasso peptide. In some embodiments, the cell-free biosynthesis system is also capable of processing a lasso peptide component in the form of a lasso core peptide into a matured lasso peptide or functional fragment of lasso peptide.

[0275] 5.3.4.1 Assembly of Lasso-Displaying Phage in the Periplasmic Space

[0276] In one aspect, provided herein are systems for producing a phage display library using a phage species that assembles progeny phage particles in the periplasmic space of a host cell (such as an M13 phage). Particularly, in some embodiments, the systems comprise (i) a first nucleic acid sequence encoding one or more structural proteins of a phage; (ii) a second nucleic acid sequence encoding at least one lasso peptide component; and (iii) a third nucleic acid sequence encoding at least one lasso peptide biosynthesis component.

[0277] Particularly, in some embodiments, the first nucleic acid sequence encodes one or more structural proteins of a phage. According to the present disclosure, the first nucleic acid sequence can be provided in the form of one or more vectors, such as plasmids. For example, in some embodiments, the first nucleic acid sequence is in the form of a plurality of different plasmids each encoding at least one structural protein of a phage. In some embodiments, the first nucleic is in the form of one plasmid encoding a plurality of phage structural proteins. Alternatively, in some embodiments, the first nucleic acid sequence is provided as a helper phage having the first nucleic acid sequence in the helper phage genome. In some embodiments, the helper phage genome lacks a packaging signal sequence that enables the packaging of the helper phage genome sequence into a phage. In some embodiments, the helper phage genome further comprises a sequence that prevents the packaging of the helper phage genome sequence into a phage. In some embodiments, the helper phage genome further comprises a sequence that reduces the efficiency of packaging the helper phage genome sequence into a phage. In particular embodiments, the helper phage is M13KO7. In particular embodiments, the helper phage is VCSM13.

[0278] In some embodiments, the phage structural proteins encoded by the first nucleic acid sequence can form a phage capsid. Particularly, in some embodiments, the first nucleic acid sequence encodes one structural protein that is capable of forming a phage capsid composed of the structural protein. In other embodiments, the first nucleic acid sequence encodes multiple different structural proteins that are capable of forming a phage capsid composed of different structural proteins.

[0279] In some embodiments, the first nucleic acid sequences encode at least one structural protein of a phage that is capable of assembling into a phage capsid together with a phage coat protein. Particularly, in some embodiments, the phage coat protein is encoded by a nucleic acid molecule different from the nucleic acid molecule containing the first nucleic acid sequence. For example, in some embodiments, the phage coat protein is encoded by the second nucleic acid sequence as provided herein. In some embodiments, the at least one phage structural protein encoded by the first nucleic acid sequence and the phage coat protein encoded by the second nucleic acid sequence are proteins derived from the same phage species. In other embodiments, the at least one phage structural protein encoded by the first nucleic acid sequence and the phage coat protein encoded by the second nucleic acid sequence are proteins derived from the different phage species.

[0280] In some embodiments, the first nucleic acid sequence encodes one or more structural protein of a phage that is a tailed phage, a non-tailed phage, a polyhedral phage, a filamentous phage, or a pleomorphic phage. Particularly, in some embodiments, the first nucleic acid sequences encodes one or more structural protein of a phage that is an M13 phage, a fl phage or a fd phage. Particularly, in some embodiments, the first nucleic acid sequence encodes one or more of proteins p3, p6, p7, p8, p9 of the M13 phage. In some embodiments, the first nucleic acid sequence encodes proteins p3, p6, 157, p8, and p9 of the M13 phage.

[0281] In some embodiments, in the first nucleic acid sequence, the sequences coding for different components of the fusion protein are operably linked to the same expression regulatory element. In some embodiments, the sequences coding for different components of the fusion protein are operably linked to at least two different expression regulatory elements. In some embodiments, the expression regulatory element is a cis-regulatory element (CRE) of a gene. In some embodiments, the expression regulatory element is a promoter sequence. In some embodiments, the expression regulator element is an enhancer sequence. In some embodiments, the expression regulator element is an attenuator sequence.

[0282] In some embodiments, the first nucleic acid sequence encoding the fusion protein comprising a lasso peptide biosynthesis component further comprises a replication origin sequence, such that a nucleic acid molecule comprising the first nucleic acid sequence can be replicated inside a cell. In some embodiments, the first nucleic acid sequence encoding the fusion protein comprising a lasso peptide biosynthesis component is part of a cloning vector. In particular embodiments, the first nucleic acid sequence encoding the fusion protein comprising a lasso peptide biosynthesis component is part of a plasmid.

[0283] In some embodiments, the second nucleic acid sequence encodes a fusion protein comprising a lasso peptide component, a phage coat protein and a periplasmic secretion signal. According to the present disclosure, the lasso peptide component in the fusion protein encoded by the second nucleic acid sequence can be (i) a lasso peptide; (ii) a functional fragment of lasso peptide; (iii) a lasso precursor peptide; and (iv) a lasso core peptide. In particular embodiments, the lasso peptide component in the fusion protein encoded by the second nucleic acid sequence is a lasso precursor peptide.

[0284] Particularly, in some embodiments, the second nucleic acid sequence comprises a sequence derived from a lasso peptide biosynthesis gene cluster. In some embodiments, the second nucleic acid sequence comprises a sequence derived from Gene A of a lasso peptide biosynthesis gene cluster. Particularly, in some embodiments, the nucleic acid molecule comprises a sequence having the same sequence of a Gene A, or a fragment thereof. For example, in some embodiments, the fragment of Gene A comprised in the nucleic acid molecule is the open reading flame of Gene A. In other embodiments, the nucleic acid molecule comprises a variant of Gene A sequence, or a fragment thereof. For example, one or more mutations can be introduced into the Gene A sequence, or into a fragment of the Gene A sequence. In some embodiments, a variant of the Gene A sequence or a fragment of Gene A sequence (e.g. the ORF) has greater than 30% sequence identity to the Gene A sequence or the fragment of Gene A sequence (e.g., the ORF). The mutations can be introduced using various methods as described herein or known in the art.

[0285] Particularly, in some embodiments, the nucleic acid molecule comprises a sequence selected from any one of the odd numbers of SEQ ID NOS:1-2630. In some embodiments, the nucleic acid molecule comprises a sequence that has greater than 30% sequence identity to any one of the odd numbers of SEQ ID NOS:1-2630. In some embodiments, the nucleic acid molecule comprises a sequence that has greater than 40% sequence identity to any one of the odd numbers of SEQ ID NOS:1-2630. In some embodiments, the nucleic acid molecule comprises a sequence that has greater than 50% sequence identity to any one of the odd numbers of SEQ ID NOS:1-2630. In some embodiments, the nucleic acid molecule comprises a sequence that has greater than 60% sequence identity to any one of the odd numbers of SEQ ID NOS:1-2630. In some embodiments, the nucleic acid molecule comprises a sequence that has greater than 70% sequence identity to any one of the odd numbers of SEQ ID NOS:1-2630. In some embodiments, the nucleic acid molecule comprises a sequence that has greater than 80% sequence identity to any one of the odd numbers of SEQ ID NOS:1-2630. In some embodiments, the nucleic acid molecule comprises a sequence that has greater than 90% sequence identity to any one of the odd numbers of SEQ ID NOS:1-2630. In some embodiments, the nucleic acid molecule comprises a sequence that has greater than 95% sequence identity to any one of the odd numbers of SEQ ID NOS:1-2630. In some embodiments, the nucleic acid molecule comprises a sequence that has greater than 99% sequence identity to any one of the odd numbers of SEQ ID NOS:1-2630.

[0286] In some embodiments, the second nucleic acid sequence further comprises a sequence encoding a phage coat protein. In some embodiments, the phage coat protein in the fusion protein encoded by the second nucleic acid is a functional variant of a phage coat protein.

[0287] In some embodiments, the second nucleic acid molecule comprises a sequence encoding a phage coat protein, or a function variant thereof. In some embodiments, the functional variant of the phage coat protein has a different amino acid sequence as compared to the wild-type coat protein, but retain the functionality of the phage coat protein of assembly into the phage. In some embodiments, the sequence encoding the coat protein in the second nucleic acid molecule contains one or more point mutations as compared to the wild-type sequence encoding the phage coat protein. In some embodiments, the sequence encoding the phage coat protein in the second nucleic acid molecule comprises one or more deletion mutations as compared to the wild-type sequence encoding the phage coat protein. In some embodiments, the sequence encoding the phage coat protein in the second nucleic acid molecule comprises one or more insertion mutations as compared to the wild-type sequence encoding the phage coat protein. In some embodiments, the sequence encoding the phage coat protein in the second nucleic acid molecule comprises one or more missense mutations as compared to the wild-type sequence encoding the phage coat protein. In some embodiments, the second nucleic acid molecule comprises a truncated open reading frame that encodes a truncated version of the phage coat protein. In some embodiments, the truncation is at the 5′ end of the open reading frame. In other embodiments, the truncation is at the 3′ end of the open reading frame. In some embodiments, the second nucleic acid encodes a domain shuffling mutant of the phage coat protein. In some embodiments, the second nucleic acid encodes a domain swapping mutant of the phage coat protein.

[0288] In some embodiments, the second nucleic acid sequence further comprises a sequence encoding a periplasmic secretion signal. In some embodiments, the periplasmic secretion signal in the fusion protein encoded by the second nucleic acid sequence is a periplasmic space-targeting signal sequence derived from TorA, PelB, OmpA, pi, PhoA, DsbA, TolB, TorT, a substrate of the Type II Secretion System (T2SS), or a functional variant thereof.

[0289] According to the present disclosure, the different fragments of the second nucleic acid sequence can have various orientations with respect to one another. For example, in some embodiments, the sequence encoding for the lasso peptide component is located upstream to the sequence encoding the phage coat protein. In some embodiments, the sequence encoding for the lasso peptide component is located upstream to the sequence encoding the periplasmic secretion signal. In some embodiments, the sequence encoding the coat protein is located upstream to the sequence encoding the lasso peptide component. In some embodiments, the sequence encoding for the lasso peptide component is located upstream to the sequence encoding the periplasmic secretion signal. In some embodiments, the sequence encoding the periplasmic secretion signal is located upstream to the sequence encoding the lasso peptide component. In some embodiments, the sequence encoding the periplasmic secretion signal is located upstream to the sequence encoding the phage coat protein. In some embodiments, the sequence encoding the periplasmic secretion signal is located upstream of the sequence encoding the lasso peptide component, which in turn is upstream to the sequence encoding the phage coat protein.

[0290] In some embodiments, the second nucleic acid molecule further comprises one or more sequence encoding for a peptidic linker sequence. In some embodiments, the sequence encoding the peptidic linker sequence is located between the sequence encoding the lasso peptide fragment and the sequence encoding the phage coat protein. In some embodiments, the sequence encoding the peptidic linker sequence is located between the sequence encoding the secretion signal peptide and the sequence encoding the lasso peptide component. In some embodiments, the peptidic linker sequence is located between the sequence encoding the secretion signal and the sequence encoding the phage coat protein. In some embodiments, the peptidic linker is a cleavable linker. In some embodiments, the peptidic linker comprises cleavage site recognized and cleaved by a protease.

[0291] In some embodiments, in the second nucleic acid sequence, the different sequences encoding different components of the fusion protein are fused in frame with one another to code for the fusion protein comprising the different components. In some embodiments, the sequence encoding the fusion protein is operably linked to an expression regulatory element. In some embodiments, the expression regulatory element is a cis-regulatory element (CRE) of a gene. In some embodiments, the expression regulatory element is a promoter sequence. In some embodiments, the expression regulator element is an enhancer sequence. In some embodiments, the expression regulator element is an attenuator sequence.

[0292] In some embodiments, the second nucleic acid sequence encoding the fusion protein comprising a lasso peptide component further comprises a replication origin sequence, such that the nucleic acid molecule can be replicated inside a cell. In some embodiments, the second nucleic acid sequence encoding the fusion protein comprising a lasso peptide component further comprises a packaging signal sequence that enables packaging of a nucleic acid molecule comprising the second nucleic acid sequence into a phage. Various packaging signal sequences in genomes of phages can be used in connection with the present disclosure, such as those described in Fujisawa et al. Genes to Cells (1997) 2, 537-545; Supra. Various packaging signal sequences in genomes of other viruses can also be used in connection with the present disclosure, such as those described in Sun et al., Curr. Opin. Struct. Biol. 2010 February; 20(1): 114-120; Supra. In some embodiments, the replication origin sequence also serves as the packaging signal, such as the replication origin sequence of the fl phage. In some embodiments, the second nucleic acid sequence encoding the fusion protein comprising a lasso peptide component is part of a cloning vector. In particular embodiments, the second nucleic acid sequence encoding the fusion protein comprising a lasso peptide component is part of a plasmid. In particular embodiments, the second nucleic acid sequence encoding the fusion protein comprising a lasso peptide component is part of a phagemid.

[0293] In some embodiments, the third nucleic acid sequence encodes one or more fusion protein each comprising at least one lasso peptide biosynthesis component. In some embodiments, the third nucleic acid sequence encodes one or more fusion protein each comprising a lasso peptide biosynthesis component fused to a (i) secretion signal, or (ii) a purification tag. In various embodiments, the secretion signal or purification tag can be any secretion signal or purification tag described herein. In some embodiments, the lasso peptide biosynthesis component of the fusion protein encoded by the third nucleic acid sequence comprises one or more of a lasso peptidase, a lasso cyclase and an RRE.

[0294] In some embodiments, the third nucleic acid sequence comprises one or more sequence(s) derived from one or more gene(s) of a lasso peptide biosynthesis gene cluster. Particularly, in some embodiments, the third nucleic acid sequence comprises a sequence derived from Gene B of a lasso peptide biosynthesis gene cluster. In some embodiments, the third nucleic acid sequence comprises a sequence derived from Gene C of a lasso peptide biosynthesis gene cluster. In some embodiments, the third nucleic acid sequence comprises a sequence derived from Gene B and a sequence derived from Gene C of a lasso peptide biosynthesis gene cluster. In some embodiments, the third nucleic acid sequence comprises a sequence derived from a lasso peptide biosynthesis gene cluster that encodes an RRE. In some embodiments, the third nucleic acid sequence comprises a sequence derived from Gene B and a sequence derived from a lasso peptide biosynthesis gene cluster that encodes an RRE. In some embodiments, the third nucleic acid sequence comprises a sequence derived from Gene C and a sequence derived from a lasso peptide biosynthesis gene cluster that encodes an RRE. In some embodiments, the third nucleic acid sequence comprises a sequence derived from Gene B, a sequence derived from Gene C, and a sequence derived from a lasso peptide biosynthesis gene cluster that encodes an RRE.

[0295] According to the present disclosure, in some embodiments, the third nucleic acid sequence encoding a fusion protein comprising a lasso peptide biosynthesis component may comprises a sequence that is the same as a sequence of the lasso peptide biosynthesis gene cluster. Alternatively, the third nucleic acid sequence encoding a fusion protein comprising a lasso peptide biosynthesis component may comprise a sequence that is a variant of a sequence of the lasso peptide biosynthesis gene cluster. In some embodiments, a variant of a sequence of the lasso peptide biosynthesis gene cluster has a different nucleic acid sequence as compared to the wild-type gene sequence, but still encodes a functional protein product of the lasso peptide biosynthesis gene cluster. In some embodiments, a nucleic acid variant has greater than 30% sequence identity to the wild-type gene sequence.

[0296] Particularly, in some embodiments, the third nucleic acid sequence encoding a fusion protein comprising a lasso peptide biosynthesis component comprises a sequence encoding a lasso peptidase.

[0297] Particularly, in some embodiments, the third nucleic acid sequence encoding a fusion protein comprising a lasso peptide biosynthesis component comprises a sequence encoding a lasso cyclase.

[0298] Particularly, in some embodiments, the third nucleic acid sequence encoding a fusion protein comprising a lasso peptide biosynthesis component comprises a sequence encoding an RRE.

[0299] Particularly, in some embodiments, the third nucleic acid sequence encoding a fusion protein comprising a lasso peptide biosynthesis component comprises a sequence encoding a lasso peptidase and a sequence encoding a lasso cyclase. In some embodiments, the third nucleic acid sequence encoding a fusion protein comprising a lasso peptide biosynthesis component comprises a sequence encoding a lasso peptidase and a sequence encoding an RRE. In some embodiments, the third nucleic acid sequence encoding a fusion protein comprising a lasso peptide biosynthesis component comprises a sequence encoding a lasso cyclase and a sequence encoding an RRE. In some embodiments, the third nucleic acid sequence encoding a fusion protein comprising a lasso peptide biosynthesis component comprises a sequence encoding a lasso peptidase, a sequence encoding a lasso cyclase, and a sequence encoding an RRE.

[0300] In some embodiments, the third nucleic acid sequence further comprises a sequence encoding a secretion signal peptide. As provided herein, in some embodiments, the secretion signal peptide is a periplasmic secretion signal. In other embodiments, the secretion signal peptide is an extracellular secretion signal. In some embodiments, the sequence encoding the secretion signal peptide is located upstream to the sequences encoding the lasso peptide biosynthesis component. In some embodiments, the sequence encoding the secretion signal peptide is located downstream to the sequences encoding the lasso peptide biosynthesis component.

[0301] In some embodiments, the third nucleic acid sequence further comprises a sequence encoding a purification tag. The encoded purification tag can be any purification tag provided herein. In some embodiments, the sequence encoding the purification tag is located upstream to the sequences encoding the lasso peptide biosynthesis component. In some embodiments, the sequence encoding the purification tag is located downstream to the sequences encoding the lasso peptide biosynthesis component.

[0302] In some embodiments, the third nucleic acid sequence further comprises one or more sequence encoding for a peptidic linker sequence. In some embodiments, the peptidic linker sequence is located between the lasso peptide biosynthesis component and the secretion signal peptide. In some embodiments, the peptidic linker sequence is located between two or more of lasso peptide biosynthesis components comprised with the fusion protein. In some embodiments, the peptidic linker is a cleavable linker. In some embodiments, the peptidic linker comprises cleavage site recognized and cleaved by a protease.

[0303] In some embodiments, in the third nucleic acid sequence, the sequences encoding different components of the fusion protein and fused in flame with one another to code for a fusion protein comprising the different components (e.g., a fusion protein comprising a secretion signal peptide, a lasso peptidase and a lasso cyclase). In other embodiments, the sequences encoding different components of the fusion protein forms multiple open reading frames, each encoding a different protein or peptide. For example, in some embodiments, the third nucleic acid sequence comprises three open reading frames, encoding a lasso peptidase, a lasso cyclase and an RRE, respectively. Particularly, in some embodiments, the third nucleic acid sequence comprises three open reading flames, encoding a lasso peptidase fused to a secretion signal, a lasso cyclase fused to a secretion signal, and an RRE fused to a secretion signal, respectively. Particularly, in some embodiments, the nucleic acid molecule comprises three open reading flames, encoding a lasso peptidase fused to a purification tag, a lasso cyclase fused to a purification tag, and an RRE fused to a purification tag, respectively.

[0304] According to the present disclosure, the third nucleic acid sequence can be provided in the form of one or more vectors, such as plasmids. For example, in some embodiments, the third nucleic acid sequence is in the form of a plurality of different plasmids each encoding a fusion protein comprising at least one lasso peptide biosynthesis component. In some embodiments, the third nucleic is in the form of one plasmid encoding a plurality of fusion proteins each comprising a lasso peptide biosynthesis component.

[0305] In some embodiments, in the third nucleic acid sequence, the sequences coding for different components of the fusion protein are operably linked to the same expression regulatory element. In some embodiments, the sequences coding for different components of the fusion protein are operably linked to at least two different expression regulatory elements. In some embodiments, the expression regulatory element is a cis-regulatory element (CRE) of a gene. In some embodiments, the expression regulatory element is a promoter sequence. In some embodiments, the expression regulator element is an enhancer sequence. In some embodiments, the expression regulator element is an attenuator sequence.

[0306] In some embodiments, the third nucleic acid sequence encoding the fusion protein comprising a lasso peptide biosynthesis component further comprises a replication origin sequence, such that a nucleic acid molecule comprising the third nucleic acid sequence can be replicated inside a cell. In some embodiments, the third nucleic acid sequence encoding the fusion protein comprising a lasso peptide biosynthesis component is part of a cloning vector. In particular embodiments, the third nucleic acid sequence encoding the fusion protein comprising a lasso peptide biosynthesis component is part of a plasmid.

[0307] According to the present disclosure, in a system for producing a phage display library of lasso peptides, one or more of the first, second and third nucleic acid sequences can form part of the same nucleic acid molecule. Particularly, in some embodiments, the system comprises (i) a first nucleic acid molecule comprising any one of the first nucleic acid sequences as provided herein; (ii) a second nucleic acid molecule comprising any one of the second nucleic acid sequences as provided herein; and (iii) a third nucleic acid molecule comprising any one of the third nucleic acid sequences as provided herein. In some embodiments, the system comprises (i) a first nucleic acid molecule comprising any one of the first nucleic acid sequences and any one of the second nucleic acid sequences as provided herein; and (ii) a second nucleic acid molecule comprising any one of the third nucleic acid sequences as provided herein. In some embodiments, the system comprises (i) a first nucleic acid molecule comprising any one of the first nucleic acid sequences and any one of the third nucleic acid sequences as provided herein; and (ii) a second nucleic acid molecule comprising any one of the second nucleic acid sequences as provided herein. In some embodiments, the system comprises (i) a first nucleic acid molecule comprising any one of the second nucleic acid sequences and any one of the third nucleic acid sequences as provided herein; and (ii) a second nucleic acid molecule comprising any one of the first nucleic acid sequences as provided herein. In some embodiments, the system comprises a nucleic acid molecule comprising any one of the first nucleic acid sequences, any one of the second nucleic acid sequences as provided herein, and any one of the third nucleic acid sequences as provided herein.

[0308] Furthermore, as disclosed herein, in various embodiments, at least one of the nucleic acid molecule in the system is a cloning vector. In various embodiments, at least one of the nucleic molecule in the system is a phagemid. In various embodiments, at least one of the nucleic acid molecule in the system is provided as a phage having a genome comprising the nucleic acid molecule.

[0309] In some embodiments, the system for producing the phage display library further comprises a cell. In some embodiments, the cell comprises one or more of the first nucleic acid sequence, the second nucleic acid sequence and the third nucleic acid sequence. In some embodiments, the cell is susceptible to transfection by a vector comprising one or more of the first nucleic acid sequence, the second nucleic acid sequence and the third nucleic acid sequence. In some embodiments, the cell is a host for a phage having a genome comprising the one or more of the first nucleic acid sequence, the second nucleic acid sequence and the third nucleic acid sequence.

[0310] In some embodiments, the cell is capable of expressing proteins encoded by the nucleic acid molecules of the system. In some embodiments, the cell is capable of assembling the proteins encoded by the first nucleic acid sequence into a phage capsid. In some embodiments, the cell is capable of assembling a protein encoded by the second nucleic acid sequence into a phage capsid. In some embodiments, the cell is capable of packaging a nucleic acid molecule comprising the second nucleic acid sequence into the phage capsid. In some embodiments, the cell has a periplasmic space. Particularly, in some embodiments, the cell is capable of transporting a protein encoded by the second nucleic acid sequence into the periplasmic space. In some embodiments, the cell is capable of transporting a protein encoded by the third nucleic acid sequence into the periplasmic space. In some embodiments, the cell is capable of transporting a protein encoded by the third nucleic acid sequence to the outside of the cell. In some embodiments, the cell is capable of processing a lasso precursor peptide into a lasso peptide or functional fragment of lasso peptide in the periplasmic space. In some embodiments, the cell is capable of assembling a protein encoded by the second nucleic acid sequence into a phage capsid. In some embodiments, the cell can perform the functions disclosed herein via an endogenous mechanism (e.g., endogens protein or signal pathway). In other embodiments, exogenous mechanism (e.g., exogenous genes) can be introduced into the cell to confer the one or more cellular functions described herein that lead to the production of a phage displaying a lasso peptide component. In some embodiments, exogenous mechanism can be introduced into the cell to supplement or strengthen an existing endogenous mechanism that lead to the production of a phage displaying a lasso peptide component.

[0311] In some embodiments, the cell is a microbial organism known to be applicable to fermentation processes as described herein. In some embodiments, the microbial cell is a bacterial cell or an archaeal cell. In some embodiments, the microbial cell is a host for the phage from which the structural protein encoded by the first nucleic acid sequence is derived. In some embodiments, the microbial cell is a host for the phage from which the coat protein encoded by the second nucleic acid sequence is derived. In some embodiments, the microbial cell is a host of a helper phage having a genome comprising the first nucleic acid sequence. Exemplary microbial organisms that can be used in connection with the present disclosure include but are not limited to Escherichia coli, Klebsiella oxytoca, Anaerobiospirillum succiniciproducens, Actinobacillus succinogenes, Mannheimia succiniciproducens, Rhizobium etli, Bacillus subtilis, Corynebacterium glutamicum, Gluconobacter oxydans, Zymomonas mobilis, Lactococcus lactis, Lactobacillus plantarum, Streptomyces coelicolor, Clostridium acetobutylicum, Vibrio natriegens, Pseudomonas fluorescens, and Pseudomonas putida. E. coli is a particularly useful host organism since it is a well characterized microbial organism suitable for genetic engineering.

[0312] In some embodiments, the system for producing the phage display library further comprises a culture medium suitable for the growth of a microbial cell containing one or more of the first nucleic acid sequence, the second nucleic acid sequence and the third nucleic acid sequence is in a culture medium. In some embodiments, the system for producing the phage display library further comprises a culture medium suitable for the expression of phage protein by a microbial cell containing one or more of the first nucleic acid sequence, the second nucleic acid sequence and the third nucleic acid sequence is in a culture medium. In some embodiments, the system for producing the phage display library further comprises a culture medium suitable for the production of a phage by a microbial cell containing one or more of the first nucleic acid sequence, the second nucleic acid sequence and the third nucleic acid sequence is in a culture medium. In some embodiments, the culture medium comprises natural amino acid molecules. In some embodiments, the culture medium comprises non-natural amino acid molecules. In some embodiments, the culture medium comprises unusual amino acid molecules.

[0313] In some embodiments, one or more components of the system is purified. Particularly, in some embodiments, the system comprises one or more purified nucleic acid molecules comprising one or more of the first nucleic acid sequence, the second nucleic acid sequence and the third nucleic acid sequence. In some embodiments, the system comprises one or more purified proteins or peptide encoded by the first nucleic acid sequence, the second nucleic acid sequence or the third nucleic acid sequence. In particular embodiments, the system comprises purified fusion protein comprising one or more lasso peptide biosynthesis component. For example, in some embodiments, the system comprises a purified fusion protein comprising a lasso peptidase fused to a purification tag.

[0314] In particular embodiments, provided herein is a system comprising (i) one or more plasmid comprising any of the first nucleic acid sequence as described herein; (ii) a phagemid comprising any of the second nucleic acid sequences as described herein; and (iii) one or more plasmid comprising any of the third nucleic acid sequences as described herein.

[0315] In particular embodiments, provided herein is a system comprising (i) a helper phage comprising any of the first nucleic acid sequence as described herein; (ii) a phagemid comprising any of the second nucleic acid sequences as described herein; (iii) one or more plasmid comprising any of the third nucleic acid sequences as described herein; and (iv) a host cell of the helper phage.

[0316] In particular embodiments, provided herein is a system comprising (i) one or more plasmid comprising any of the first nucleic acid sequence as described herein; (ii) a phagemid comprising any of the second nucleic acid sequences as described herein; and (iii) one or more purified lasso peptide biosynthesis components.

[0317] In particular embodiments, provided herein is a system comprising (i) a helper phage comprising any of the first nucleic acid sequence as described herein; (ii) a phagemid comprising any of the second nucleic acid sequences as described herein; (iii) a host cell of the helper phage; and (iv) one or more purified lasso peptide biosynthesis components.

[0318] 5.3.4.2 Assembly of Lasso-Displaying Phage in the Cytoplasm

[0319] In another aspect, provided herein are systems for producing a phage display library using a phage species that assembles progeny phage particles in the cytoplasm space of a host cell (such as a T4 phage). Particularly, in some embodiments, the systems comprise (i) a first nucleic acid sequence encoding one or more structural proteins of a bacteriophage; (ii) a second nucleic acid sequence encoding a first fusion protein comprising a lasso peptide component fused to a first coat protein of the bacteriophage; and (iii) a third nucleic acid sequence encoding at least one lasso peptide biosynthesis component.

[0320] Particularly, in some embodiments, the first nucleic acid sequence encodes one or more structural proteins of a phage. In some embodiments, the one or more structural proteins of the phage encoded by the first nucleic acid sequence include one or more coat proteins selected for displaying a peptide or protein on the phage capsid. In alternative embodiments, the first nucleic acid does not encode the one or more coat protein selected for displaying a peptide or protein on the phage capsid. In various embodiments, the displayed peptide or protein can be a lasso peptide component or a non-lasso peptide or protein.

[0321] According to the present disclosure, the first nucleic acid sequence can be provided in the form of a phage genome. In some embodiments, the phage genome is wild-type. In other embodiments, the phage genome is mutated. Particularly, in some embodiments, the mutated phage genome contains one or more null mutations in at least one endogenous sequence encoding the coat protein selected for displaying a peptide or protein on the phage capsid, such that the mutated phage genome can no longer produce the wild-type coat protein. In particular embodiments, the null mutation is made by deleting the endogenous sequence encoding the coat protein from the phage genome. In some embodiments, the coat protein is a nonessential outer capsid protein, such that null mutations to their respective coding sequences do not affect the viability, reproduction or infectivity of the phage. In various embodiments, the displayed peptide or protein can be a lasso peptide component or a non-lasso peptide or protein.

[0322] In some embodiments, the second nucleic acid sequence encodes for at least one fusion protein comprising the displayed peptide or protein fused to the selected phage coat protein. In particular embodiments, the second nucleic acid sequence encodes for a fusion protein comprising a lasso peptide component fused to a first phage coat protein. In some embodiments, the second nucleic acid sequence further encodes for a fusion protein comprising a non-lasso peptide or protein fused to a second phage coat protein. According to the present disclosure, the phage coat protein in the first and second fusion proteins can be the same coat protein or different coat proteins of the phage.

[0323] In some embodiments, the first and second nucleic acid sequences are in the same nucleic acid molecule. In other embodiments, the first and second nucleic acid sequence are in different nucleic acid molecules. In particular embodiments, the different nucleic acid molecules are configured to undergo homologous recombination to produce a recombinant molecule comprising both the first and second nucleic acid sequences. In some embodiments, the system further comprises enzymes catalyzing the recombination. In some embodiments, the enzymes catalyzing the recombination is provided in a host cell. In some embodiments, the enzyme catalyzing the recombination is provided in a cell-free biosynthesis reaction mixture.

[0324] Accordingly, in some embodiments, the present system comprises a mutated phage genome wherein the mutated genome comprises the first nucleic acid sequence encoding structural proteins of the phage. In some embodiments, the mutated phage genome further comprises the second nucleic acid sequence encoding for a first fusion protein comprising a lasso peptide component fused to a first coat protein. In some embodiments, the second nucleic acid sequence in the mutated phage genome further comprises a second fusion protein comprising a non-lasso peptide or protein fused to a second coat protein. In various embodiments, the first and second fusion proteins can be the same or different.

[0325] In some embodiments, the mutated phage genome comprises a null mutation in the endogenous sequence encoding the first protein coat protein. In some embodiments, the mutated phage genome comprises a null mutation in the endogenous sequence encoding the second protein coat protein. In various embodiments, the null mutation is a deletion of the endogenous encoding sequence from the phage genome.

[0326] In alternative embodiments, the mutated genome comprises the endogenous sequence encoding the first and/or second coat protein. In some embodiments, the expression levels of the endogenous coat protein and the fusion protein comprising the coat protein are controlled such that the expressed proteins are assembled onto a phage capsid at a desirable ratio. Particularly, in some embodiments, the expression levels are controlled via the use of expression regulatory elements. Particularly, the endogenous sequence encoding the coat protein and the sequence encoding the fusion protein comprising the coat protein can be operably linked to the same or different expression regulatory elements. Suitable expression regulatory elements are within the common knowledge of the art, such as a cis-regulatory element (CRE) of a gene, a promoter sequence, an enhancer sequence or an attenuator sequence.

[0327] In various embodiments, the non-lasso peptide or protein in the second fusion protein is configured to identify and/or manipulate its displaying phage, and thus the lasso peptide component displayed on said phage. In some embodiments, the non-lasso peptide or protein in the second fusion protein is an identification peptide. In some embodiments, the identification peptide is a detectable probe. In other embodiments, the identification peptide is a purification tag.

[0328] In some embodiments, the lasso peptide component and the identification peptide to be displayed are fused to different coat proteins of the phage. Particularly, in some embodiments, the phage is a non-naturally occurring T4 phage, and the lasso peptide component is fused to HOC, and the identification peptide is fused to SOC. Particularly, in some embodiments, the phage is a non-naturally occurring T4 phage, and the lasso peptide component is fused to SOC, and the identification peptide is fused to HOC. In some embodiments, the phage is a non-naturally occurring λ (lambda) phage, and the lasso peptide component is fused to pV, and the identification peptide is fused to pD. In some embodiments, the phage is a non-naturally occurring λ (lambda) phage, and the lasso peptide component is fused to pD, and the identification peptide is fused to pV.

[0329] In some embodiments, the lasso peptide component and the identification peptide to be displayed are fused to the same coat protein of the phage. Particularly, in some embodiments, the phage is a non-naturally occurring T4 phage, and the lasso peptide component is fused to HOC, and the identification peptide is fused to HOC. In some embodiments, the phage is a non-naturally occurring T4 phage, and the lasso peptide component is fused to SOC, and the identification peptide is fused to SOC. In some embodiments, the phage is a non-naturally occurring T7 phage, and the lasso peptide component is fused to pX, and the identification peptide is fused to pX. In some embodiments, the phage is a non-naturally occurring λ (lambda) phage, and the lasso peptide component is fused to pD, and the identification peptide is fused to pD. In some embodiments, the phage is a non-naturally occurring λ (lambda) phage, and the lasso peptide component is fused to pV, and the identification peptide is fused to pV.

[0330] In some embodiments, the second nucleic acid sequence encodes a fusion protein comprising a lasso peptide component and a phage coat protein. According to the present disclosure, the lasso peptide component in the fusion protein encoded by the second nucleic acid sequence can be (i) a lasso peptide; (ii) a functional fragment of lasso peptide; (iii) a lasso precursor peptide; and (iv) a lasso core peptide. In particular embodiments, the lasso peptide component in the fusion protein encoded by the second nucleic acid sequence is a lasso precursor peptide.

[0331] Particularly, in some embodiments, the second nucleic acid sequence comprises a sequence derived from a lasso peptide biosynthesis gene cluster. In some embodiments, the second nucleic acid sequence comprises a sequence derived from Gene A of a lasso peptide biosynthesis gene cluster. Particularly, in some embodiments, the nucleic acid molecule comprises a sequence having the same sequence of a Gene A, or a fragment thereof. For example, in some embodiments, the fragment of Gene A comprised in the nucleic acid molecule is the open reading frame of Gene A. In other embodiments, the nucleic acid molecule comprises a variant of Gene A sequence, or a fragment thereof. For example, one or more mutations can be introduced into the Gene A sequence, or into a fragment of the Gene A sequence. In some embodiments, a variant of the Gene A sequence or a fragment of Gene A sequence (e.g. the ORF) has greater than 30% sequence identity to the Gene A sequence or the fragment of Gene A sequence (e.g., the ORF). The mutations can be introduced using various methods as described herein or known in the art.

[0332] Particularly, in some embodiments, the nucleic acid molecule comprises a sequence selected from any one of the odd numbers of SEQ ID NOS:1-2630. In some embodiments, the nucleic acid molecule comprises a sequence that has greater than 30% sequence identity to any one of the odd numbers of SEQ ID NOS:1-2630. In some embodiments, the nucleic acid molecule comprises a sequence that has greater than 40% sequence identity to any one of the odd numbers of SEQ ID NOS:1-2630. In some embodiments, the nucleic acid molecule comprises a sequence that has greater than 50% sequence identity to any one of the odd numbers of SEQ ID NOS:1-2630. In some embodiments, the nucleic acid molecule comprises a sequence that has greater than 60% sequence identity to any one of the odd numbers of SEQ ID NOS:1-2630. In some embodiments, the nucleic acid molecule comprises a sequence that has greater than 70% sequence identity to any one of the odd numbers of SEQ ID NOS:1-2630. In some embodiments, the nucleic acid molecule comprises a sequence that has greater than 80% sequence identity to any one of the odd numbers of SEQ ID NOS:1-26308. In some embodiments, the nucleic acid molecule comprises a sequence that has greater than 90% sequence identity to any one of the odd numbers of SEQ ID NOS:1-2630. In some embodiments, the nucleic acid molecule comprises a sequence that has greater than 95% sequence identity to any one of the odd numbers of SEQ ID NOS:1-2630. In some embodiments, the nucleic acid molecule comprises a sequence that has greater than 99% sequence identity to any one of the odd numbers of SEQ ID NOS:1-2630.

[0333] In some embodiments, the second nucleic acid sequence further comprises a sequence encoding a phage coat protein. As described herein, the phage coat protein in the fusion protein encoded by the second nucleic acid can be derived from a T4 page, a T7 phage, a λ phage, an MS2 phage, or a ΦX174 phage. More particularly, in some embodiments, the phage coat protein in the fusion protein encoded by the second nucleic acid is derived from the SOC (small outer capsid) protein or HOC (highly antigenic outer capsid) protein of a T4 phage, pX of a T7 phage, pD or pV of a λ (lambda) phage, the MS2 Coat Protein (CP) of an MS2 phage, or the ΦX 174 major spike protein G of a ΦX 174 phage. In some embodiments, the phage coat protein in the fusion protein encoded by the second nucleic acid is a functional variant of a phage coat protein.

[0334] In some embodiments, the second nucleic acid molecule comprises a sequence encoding a phage coat protein, or a function variant thereof. In some embodiments, the functional variant of the phage coat protein has a different amino acid sequence as compared to the wild-type coat protein, but retain the functionality of the phage coat protein of assembly into the phage. In some embodiments, the sequence encoding the coat protein in the second nucleic acid molecule contains one or more point mutations as compared to the wild-type sequence encoding the phage coat protein. In some embodiments, the sequence encoding the phage coat protein in the second nucleic acid molecule comprises one or more deletion mutations as compared to the wild-type sequence encoding the phage coat protein. In some embodiments, the sequence encoding the phage coat protein in the second nucleic acid molecule comprises one or more insertion mutations as compared to the wild-type sequence encoding the phage coat protein. In some embodiments, the sequence encoding the phage coat protein in the second nucleic acid molecule comprises one or more missense mutations as compared to the wild-type sequence encoding the phage coat protein. In some embodiments, the second nucleic acid molecule comprises a truncated open reading frame that encodes a truncated version of the phage coat protein. In some embodiments, the truncation is at the 5′ end of the open reading frame. In other embodiments, the truncation is at the 3′ end of the open reading frame. In some embodiments, the second nucleic acid encodes a domain shuffling mutant of the phage coat protein. In some embodiments, the second nucleic acid encodes a domain swapping mutant of the phage coat protein.

[0335] According to the present disclosure, the different fragments of the second nucleic acid sequence can have various orientations with respect to one another. For example, in some embodiments, the sequence encoding for the lasso peptide component is located upstream to the sequence encoding the phage coat protein. In some embodiments, the sequence encoding the coat protein is located upstream to the sequence encoding the lasso peptide component.

[0336] In some embodiments, the second nucleic acid molecule further comprises one or more sequence encoding for a peptidic linker sequence. In some embodiments, the sequence encoding the peptidic linker sequence is located between the sequence encoding the lasso peptide fragment and the sequence encoding the phage coat protein. In some embodiments, the peptidic linker is a cleavable linker. In some embodiments, the peptidic linker comprises cleavage site recognized and cleaved by a protease.

[0337] In some embodiments, in the second nucleic acid sequence, the different sequences encoding different components of the fusion protein are fused in frame with one another to code for the fusion protein comprising the different components. In some embodiments, the sequence encoding the fusion protein is operably linked to an expression regulatory element. In some embodiments, the expression regulatory element is a cis-regulatory element (CRE) of a gene. In some embodiments, the expression regulatory element is a promoter sequence. In some embodiments, the expression regulator element is an enhancer sequence. In some embodiments, the expression regulator element is an attenuator sequence. In some embodiments, the second nucleic acid sequence encoding the fusion protein comprising a lasso peptide component further comprises a replication origin sequence, such that the nucleic acid molecule can be replicated inside a cell.

[0338] In some embodiments, the third nucleic acid sequence encodes one or more lasso peptide biosynthesis component. In some embodiments, the third nucleic acid sequence encodes one or more fusion protein each comprising a lasso peptide biosynthesis component fused to a purification tag. In various embodiments, the purification tag can be any purification tag described herein. In some embodiments, the lasso peptide biosynthesis component of the fusion protein encoded by the third nucleic acid sequence comprises one or more of a lasso peptidase, a lasso cyclase and an RRE.

[0339] In some embodiments, the third nucleic acid sequence comprises one or more sequence(s) derived from one or more gene(s) of a lasso peptide biosynthesis gene cluster. Particularly, in some embodiments, the third nucleic acid sequence comprises a sequence derived from Gene B of a lasso peptide biosynthesis gene cluster. In some embodiments, the third nucleic acid sequence comprises a sequence derived from Gene C of a lasso peptide biosynthesis gene cluster. In some embodiments, the third nucleic acid sequence comprises a sequence derived from Gene B and a sequence derived from Gene C of a lasso peptide biosynthesis gene cluster. In some embodiments, the third nucleic acid sequence comprises a sequence derived from a lasso peptide biosynthesis gene cluster that encodes an RRE. In some embodiments, the third nucleic acid sequence comprises a sequence derived from Gene B and a sequence derived from a lasso peptide biosynthesis gene cluster that encodes an RRE. In some embodiments, the third nucleic acid sequence comprises a sequence derived from Gene C and a sequence derived from a lasso peptide biosynthesis gene cluster that encodes an RRE. In some embodiments, the third nucleic acid sequence comprises a sequence derived from Gene B, a sequence derived from Gene C, and a sequence derived from a lasso peptide biosynthesis gene cluster that encodes an RRE.

[0340] According to the present disclosure, in some embodiments, the third nucleic acid sequence encoding a lasso peptide biosynthesis component may comprises a sequence that is the same as a sequence of the lasso peptide biosynthesis gene cluster. Alternatively, the third nucleic acid sequence encoding a lasso peptide biosynthesis component may comprise a sequence that is a variant of a sequence of the lasso peptide biosynthesis gene cluster. In some embodiments, a variant of a sequence of the lasso peptide biosynthesis gene cluster has a different nucleic acid sequence as compared to the wild-type gene sequence, but still encodes a functional protein product of the lasso peptide biosynthesis gene cluster. In some embodiments, a nucleic acid variant has greater than 30% sequence identity to the wild-type gene sequence.

[0341] Particularly, in some embodiments, the third nucleic acid sequence encoding a lasso peptide biosynthesis component comprises a sequence encoding a lasso peptidase.

[0342] Particularly, in some embodiments, the third nucleic acid sequence encoding a lasso peptide biosynthesis component comprises a sequence encoding a lasso cyclase.

[0343] Particularly, in some embodiments, the third nucleic acid sequence encoding a lasso peptide biosynthesis component comprises a sequence encoding an RRE

[0344] Particularly, in some embodiments, the third nucleic acid sequence encoding a lasso peptide biosynthesis component comprises a sequence encoding a lasso peptidase and a sequence encoding a lasso cyclase. In some embodiments, the third nucleic acid sequence encoding a fusion protein comprising a lasso peptide biosynthesis component comprises a sequence encoding a lasso peptidase and a sequence encoding an RRE. In some embodiments, the third nucleic acid sequence encoding a fusion protein comprising a lasso peptide biosynthesis component comprises a sequence encoding a lasso cyclase and a sequence encoding an RRE. In some embodiments, the third nucleic acid sequence encoding a fusion protein comprising a lasso peptide biosynthesis component comprises a sequence encoding a lasso peptidase, a sequence encoding a lasso cyclase, and a sequence encoding an RRE.

[0345] In some embodiments, the third nucleic acid sequence further comprises a sequence encoding a purification tag. The encoded purification tag can be any purification tag provided herein. In some embodiments, the sequence encoding the purification tag is located upstream to the sequences encoding the lasso peptide biosynthesis component. In some embodiments, the sequence encoding the purification tag is located downstream to the sequences encoding the lasso peptide biosynthesis component.

[0346] In some embodiments, the third nucleic acid sequence further comprises one or more sequence encoding for a peptidic linker sequence. In some embodiments, the peptidic linker sequence is located between the lasso peptide biosynthesis component and the secretion signal peptide. In some embodiments, the peptidic linker sequence is located between two or more of lasso peptide biosynthesis components comprised with the fusion protein. In some embodiments, the peptidic linker is a cleavable linker. In some embodiments, the peptidic linker comprises cleavage site recognized and cleaved by a protease.

[0347] In some embodiments, in the third nucleic acid sequence, the sequences encoding different components of the fusion protein and fused in flame with one another to code for a fusion protein comprising the different components (e.g., a fusion protein comprising a lasso peptidase and a lasso cyclase). In other embodiments, the sequences encoding different components of the fusion protein forms multiple open reading frames, each encoding a different protein or peptide. For example, in some embodiments, the third nucleic acid sequence comprises three open reading flames, encoding a lasso peptidase, a lasso cyclase and an RRE, respectively. Particularly, in some embodiments, the third nucleic acid sequence comprises three open reading flames, encoding a lasso peptidase fused to a purification tag, a lasso cyclase fused to a purification tag, and an RRE fused to a purification tag, respectively.

[0348] According to the present disclosure, the third nucleic acid sequence can be provided in the form of one or more vectors, such as plasmids. For example, in some embodiments, the third nucleic acid sequence is in the form of a plurality of different plasmids each encoding at least one lasso peptide biosynthesis component. In some embodiments, the third nucleic is in the form of one plasmid encoding multiple lasso peptide biosynthesis components.

[0349] In some embodiments, in the third nucleic acid sequence, the sequences coding for different lasso peptide biosynthesis components are operably linked to the same expression regulatory element. In some embodiments, the sequences coding for different lasso peptide biosynthesis components are operably linked to at least two different expression regulatory elements. In some embodiments, the expression regulatory element is a cis-regulatory element (CRE) of a gene. In some embodiments, the expression regulatory element is a promoter sequence. In some embodiments, the expression regulator element is an enhancer sequence. In some embodiments, the expression regulator element is an attenuator sequence.

[0350] In some embodiments, the third nucleic acid sequence encoding a lasso peptide biosynthesis component further comprises a replication origin sequence, such that a nucleic acid molecule comprising the third nucleic acid sequence can be replicated inside a cell. In some embodiments, the third nucleic acid sequence encoding a lasso peptide biosynthesis component is part of a cloning vector. In particular embodiments, the third nucleic acid sequence encoding a lasso peptide biosynthesis component is part of a plasmid.

[0351] According to the present disclosure, in a system for producing a phage display library of lasso peptides, one or more of the first, second and third nucleic acid sequences can form part of the same nucleic acid molecule. In some embodiments, the nucleic acid molecule can be a wild-type or mutated phage genome. In some embodiments, the structural proteins encoded by the first sequence can assemble into a protein capsid. In some embodiments, the phage genome comprising one or more of the first, second and third nucleic acid sequences can be packaged into the protein capsid.

[0352] In some embodiments, the second nucleic acid sequence encodes at least one fusion protein. In some embodiments, the at least one fusion proteins comprises a first fusion protein comprising a lasso peptide component fused to a coat protein of the phage. In some embodiments, the at least one fusion proteins further comprises a second fusion protein comprising a non-lasso peptide or protein fused to a coat protein of the phage. In various embodiments, the coat proteins in the first and the second fusion proteins can be the same or different.

[0353] In some embodiments, the first and second nucleic acid sequences of the present system are in the same nucleic acid molecule. In other embodiments, the first and second nucleic acid sequences of the present system are in separate nucleic acid molecules. Particularly, in some embodiments, the molecules containing the first and second nucleic acid sequences are capable of undergoing homologous recombination to produce a recombinant sequence containing both the first and second nucleic acid sequence.

[0354] In some embodiments, the first and second nucleic acid sequence can be provided in the form of a phage genome. Particularly, in some embodiments

[0355] 5.3.5 Phage Display Library Members

[0356] In one aspect, provided herein are phage display libraries comprising a plurality of lasso peptide components. According to the present disclosure, the lasso peptide component present in the phage display library can be (i) a lasso peptide, (ii) a functional fragment of lasso peptide, (iii) a lasso precursor peptide; or (iv) a lasso core peptide. In some embodiments, the lasso peptide component of the fusion protein can undergo transition under a suitable condition among the different forms (i), (ii), (iii) and (iv).

[0357] In some embodiments, the library comprises at least one phage comprising a coat protein comprising the lasso peptide component. Particularly, in some embodiments, the lasso peptide component is displayed on the surface of the phage capsid. In some embodiments, the phage further comprises a nucleic acid molecule encoding at least part of the lasso peptide component. In some embodiments, the phage capsid encloses the nucleic acid molecule encoding at least part of the lasso peptide component. In some embodiments, the nucleic acid molecule is a phagemid.

[0358] In some embodiments, the nucleic acid molecule comprises the phage genome sequences. In specific embodiments, the nucleic acid sequence comprises the wild-type phage genome. In specific embodiments, the nucleic acid sequence comprises a mutated version of the phage genome. For example, in some embodiments, the mutated phage genome does not encode one or more wild-type coat proteins that are selected to make the fusion proteins for displaying lasso peptide component and other non-lasso peptide or protein components. In some embodiments, the mutated genome has a null mutation is one or more endogenous sequences encoding such coat proteins. In particular embodiments, the null mutation is introduced by deleting the endogenous sequence from the phage genome. Furthermore, in some embodiments, the mutated phage genome further comprises an exogenous sequence encoding a fusion protein containing the coat protein.

[0359] In particular embodiments, the nucleic acid molecule encodes a fusion protein comprising the lasso peptide component and the phage coat protein. In particular embodiments, the nucleic acid encodes a fusion protein comprising the lasso peptide component, the phage coat protein and a periplasmic secretion signal. In particular embodiments, the nucleic acid encodes a fusion protein comprising an identification peptide and a phage coat protein. In some embodiments, one or more of the phage coat protein forming the fusion proteins described herein are nonessential outer capsid proteins of the phage.

[0360] In some embodiments, the nucleic acid molecule encodes (i) a fusion protein comprising the lasso peptide component and the phage coat protein; and (ii) one or more phage structural proteins. Particularly, the one or more phage structural proteins and the fusion protein are capable of assembling together into a phage capsid. In some embodiments, the nucleic acid molecule further comprises a packaging signal that is recognized by the one or more phage structural proteins and is packaged into the phage capsid. In some embodiments, the coat protein in the fusion protein and the one or more structural proteins are derived from the same phage species. In other embodiments, the coat protein in the fusion protein and the one or more structural proteins are derived from different phage species. Many phage species are known in the art and can be used in connection with the present disclosure. For example, the coat protein or the one or more structural protein may be derived from a phage that assembles new phage particles in the periplasmic space of the host cell, such as an M13 phage, a fl phage or a fd phage, and phages that assembles new phage particles in the cytosol of the host cell, such as a T4 phage, a T7 phage, a λ (lambda) phage, an MS2 phage or a ΦX714 phage.

[0361] Particularly, in some embodiments, the phage coat protein is derived from p3, p6, p7, p8 or p9 of filamentous phages. In other embodiments, the phage coat protein is derived from SOC (small outer capsid) protein or HOC (highly antigenic outer capsid) protein of a T4 phage, pX of a T7 phage, pD or pV of a λ (lambda) phage, the MS2 Coat Protein (CP) of an MS2 phage, or the ΦX174 major spike protein G of a ΦX174 phage.

[0362] In some embodiments, the nucleic acid encodes a phage protein (e.g., the coat protein portion of the fusion protein, or the structural protein) that is a functional variant of the wild-type phage protein. In some embodiments, the phage protein encoded by the nucleic acid has greater than 30% sequence identity to the wild-type phage protein. In some embodiments, the phage protein encoded by the nucleic acid has greater than 40% sequence identity to the wild-type phage protein. In some embodiments, the phage protein encoded by the nucleic acid has greater than 50% sequence identity to the wild-type phage protein. In some embodiments, the phage protein encoded by the nucleic acid has greater than 60% sequence identity to the wild-type phage protein. In some embodiments, the phage protein encoded by the nucleic acid has greater than 70% sequence identity to the wild-type phage protein. In some embodiments, the phage protein encoded by the nucleic acid has greater than 80% sequence identity to the wild-type phage protein. In some embodiments, the phage protein encoded by the nucleic acid has greater than 90% sequence identity to the wild-type phage protein. In some embodiments, the phage protein encoded by the nucleic acid has greater than 95% sequence identity to the wild-type phage protein. In some embodiments, the phage protein encoded by the nucleic acid has greater than 99% sequence identity to the wild-type phage protein. In particular embodiments, the phage protein encoded by the nucleic acid is a truncated version of the wild-type protein. In particular embodiments, the nucleic acid molecule comprises any one of the first nucleic acid sequences as described herein, and any one of the second nucleic acid sequences as described herein.

[0363] In some embodiments, the nucleic acid molecule encodes (i) a fusion protein comprising the lasso peptide component and the phage coat protein; (ii) one or more phage structural proteins; and (iii) at least one fusion protein each comprising one or more lasso peptide biosynthesis components. In some embodiments, the nucleic acid molecule comprises any one of the first nucleic acid sequences as described herein, any one of the second nucleic acid sequences as described herein, and any one of the third nucleic acid sequences as described herein.

[0364] In some embodiments, the phage displays a lasso peptide. In some embodiments, the phage displays a functional fragment of lasso peptide. In some embodiments, the phage displays a lasso precursor peptide. In some embodiments, the phage displays a lasso core peptide.

[0365] In some embodiments, the phage is in contact with one or more lasso peptide biosynthesis component. Particularly, in some embodiments, the phage is in contact with a lasso peptidase. Additionally or alternatively, in some embodiments, the phage is in contact with a lasso cyclase. Additionally or alternatively, in some embodiments, the phage is in contact with a REE. In some embodiments, the phage is in contact with a fusion protein comprising one or more lasso peptide biosynthesis component. In some embodiments, the phage is in contact with a fusion protein comprising a lasso peptidase and a lasso cyclase. In some embodiments, the phage is in contact with a fusion protein comprising a lasso peptidase and an RRE. In some embodiments, the phage is in contact with a fusion protein comprising a lasso cyclase and an RRE. In some embodiments, the phage is in contact with a fusion protein comprising a lasso peptidase, a lasso cyclase and an RRE. In some embodiments, the phage is in contact with any of the fusion proteins described herein. I some embodiments, the phage is in contact with any of the proteins encoded by the nucleic acid molecules described herein. In some embodiments, the phage is in contact with any of the proteins encoded by any of the third nucleic acid sequences described herein. In some embodiments, the phage is in contact with one or more lasso peptide biosynthesis components that are purified.

[0366] In particular embodiments, a phage displaying a lasso precursor peptide is in contact with a lasso peptidase and a lasso cyclase. In some embodiments, the phage is further in contact with an RRE. In some embodiments, the phage is contacted with the lasso peptide biosynthesis components under a suitable condition for the lasso peptide biosynthesis components to convert the lasso precursor peptide into a lasso peptide or a functional fragment of lasso peptide. In Particular embodiments, a phage displaying a lasso core peptide is in contact with a lasso cyclase. In some embodiments, the phage is further in contact with an RRE. In some embodiments, the phage is in contact with one or more lasso peptide biosynthesis components that are purified. In some embodiments, the phage is contacted with the lasso peptide biosynthesis components under a suitable condition for the lasso peptide biosynthesis components to convert the lasso core peptide into a lasso peptide or a functional fragment of lasso peptide. In some embodiments, the phage is in a culture medium of a host microbial organism. In some embodiments, the phage is purified. In some embodiments, the one or more lasso peptide biosynthesis components are purified.

[0367] In some embodiments, a phage displaying a lasso peptide component is produced by a host cell. In some embodiments, the host cell produces the phage in its periplasmic space. In other embodiments, the host cell produces the phage in its cytoplasm. In some embodiments, a phage displaying a lasso peptide component is produced in a cell-free biosynthesis reaction mixture as described herein.

[0368] In some embodiments, the phage display library comprises one member. In some embodiments, the phage display library comprises a plurality of different members. In some embodiments, each member of the library comprises a phage displaying a unique lasso peptide or functional fragment of lasso peptide. In some embodiments, each member of the library also comprises a unique identification mechanism for identifying or manipulation of the member. For example, in some embodiments, each member of the library is associated with a unique location on a solid support, and the locational information is used to identify the member associated therewith. In other embodiments, each member of the library comprises a phage displaying a unique lasso peptide component, and also displaying an identification peptide. Particularly, in some embodiments, the identification peptide is configured to produce a detectable signal for identification of the phage, and the unique lasso peptide component displayed thereon. In some embodiments, the identification peptide is configured to manipulate the phage and thus the unique lasso peptide component displayed thereon. In particular embodiments, the identification peptide is a purification tag configured for isolating and/or enriching a member of the library.

[0369] In some embodiments, the phage display library further comprises a solid support. In some embodiments, the solid support houses one or more members of the library. In some embodiments, the phage is an M13 phage, a fl phage, a fd phage, a T4 phage, a T7 phage, a lambda (λ) phage, an MS2 phage, or a ΦX 174 phage.

[0370] 5.3.6 Production of Phage Display Libraries

[0371] Provided herein are methods for producing a phage displaying a lasso peptide component. In certain embodiments, the methods provided herein can produce a large number of phages each displaying a lasso peptide component in a short period of time. In some embodiments, the methods provided herein can produce a plurality of phages displaying diversified species of lasso peptide components simultaneously. Particularly, in some embodiments, the methods provided herein can produce a plurality of phages each displaying a lasso peptide component, wherein the lasso peptide components of the different phages are the same. In some embodiments, the methods provided herein can produce a plurality of phages each displaying a lasso peptide component, wherein each of the lasso peptide components of the plurality of phages is unique. Also provided herein are methods for assembling a plurality of phages displaying diversified species of lasso peptide component into a phage display library.

[0372] In various embodiments, the lasso peptide component can assume the form of (i) an intact lasso peptide, (ii) a functional fragment of a lasso peptide, (iii) a lasso precursor peptide, or (iv) a lasso core peptide. A lasso peptide component can undergo transition among the different forms under a suitable condition. For example, when in contact with one or more lasso peptide biosynthesis component (e.g., a lasso peptidase, a lasso cyclase, and/or an RRE), a lasso peptide component in the form of a lasso precursor can be processed into the form of a lasso core peptide, and/or further processed into the form of an intact lasso peptide or a functional fragment of lasso peptide. In some embodiments, neither the non-lasso component of the coat protein nor other components of the phage interferes with either the functional or structural feature of the lasso peptide component.

[0373] As shown in FIGS. 3 and 4, a lasso-displaying phage can be produced using a suitable host microorganism, such as E. coli. In some embodiments, the method involves providing a system comprising (i) a first nucleic acid sequence encoding one or more structural proteins of a phage; (ii) a phagemid comprising a second nucleic acid sequence encoding a lasso peptide component fused to a phage coat protein; and (iii) a third nucleic acid sequence encoding at least one lasso peptide biosynthesis component. Next, the system is introduced into a population of host cells, such as E. coli cells. Next, the host cells comprising the introduced nucleic acid components can be cultured in a suitable culturing media and under a suitable condition to produce a plurality of phages each displaying a lasso peptide component on a coat protein.

[0374] Furthermore, as shown in FIG. 3, in some embodiments, processing the lasso peptide component into lasso peptides having the lariat-like topology can take place in the periplasmic space of the host cell, where the lasso peptide biosynthesis component is transported. Alternatively, as shown in FIG. 4, in some embodiments, processing the lasso peptide component into a lasso peptide having the lariat-like topology can take place extracellularly where the lasso peptide biosynthesis component is secreted. Alternatively, in some embodiments, processing the lasso peptide component into a lasso peptide having the lariat-like structure can take place in the cytoplasm of the host cell, where the lasso peptide biosynthesis component is produced. In any of the embodiments described in this paragraph, the lasso peptide component comprises one or more selected from a lasso peptidase, a lasso cyclase and an RRE.

[0375] As shown in FIG. 5, a lasso-displaying phage can be produced using a suitable host microorganism, such as E. coli. In some embodiments, the method involves providing a system comprising (i) a first nucleic acid sequence encoding one or more structural proteins of a phage; and (ii) a phagemid comprising a second nucleic acid sequence encoding a lasso peptide component fused to a phage coat protein. Next, the system is introduced into a population of host cells, such as E. coli cells. Next, the host cells comprising the introduced nucleic acid components can be cultured in a suitable culturing media and under a suitable condition to produce a plurality of phages each displaying a lasso peptide component on a coat protein. Next, the produced phages are contacted with lasso peptide biosynthesis components under a suitable condition to process the lasso peptide component into matured lasso peptide having the lariat-like structure. In some embodiments, the phages produced by the host cells are purified from the culturing media before contacted with the lasso peptide biosynthesis components. In some embodiments, lasso peptide biosynthesis components are added into the culture medium to process the lasso peptide component displayed on the phage into matured a lasso peptide having the lariat-like structure. In some embodiments, the lasso peptide biosynthesis component is recombinantly produced by a microorganism. In some embodiments, the lasso peptide biosynthesis component is produced by a cell-free biosynthesis system. In some embodiments, the lasso peptide biosynthesis component is chemically synthesized. In some embodiments, the lasso peptide biosynthesis component is purified before contacted with the phage displaying the lasso peptide component. In any of the embodiments described in this paragraph, the lasso peptide component comprises one or more selected from a lasso peptidase, a lasso cyclase and an RRE.

[0376] As shown in FIGS. 7 and 8, a lasso-displaying phage can be produced in the cytoplasm of a suitable host microorganism, or in a cell-free biosynthesis reaction mixture. In some embodiments, the method involves providing a system comprising (i) a first nucleic acid sequence encoding one or more structural proteins of a phage; (ii) a second nucleic acid sequence encoding a lasso peptide component fused to a phage coat protein; and (iii) a third nucleic acid sequence encoding at least one lasso peptide biosynthesis component. Next, the system is introduced into a population of host cells, such as E. coli cells. Next, the host cells comprising the introduced nucleic acid components can be cultured in a suitable culturing media and under a suitable condition to produce a plurality of phages each displaying a lasso peptide component on a coat protein.

[0377] Particularly, the first and second nucleic acid sequences can be provided in the same nucleic acid molecule. Particularly, in some embodiments, the nucleic acid molecule encodes all essential structural proteins for the phage as well as a fusion protein containing a coat protein. In some embodiments, the nucleic acid molecule encodes both a stand-alone version of the coat protein as well as a fusion protein comprising the coat protein. In some embodiments, the nucleic acid molecule does not encode a stand-alone version of the coat protein, but encodes a fusion protein comprising the coat protein. In some embodiments, the coat protein is nonessential. In some embodiments, the coat protein is nonessential outer capsid protein, such as HOC or SOC of the T4 phage, pX of the T7 phage, pD or pV of a λ (lambda) phage, the MS2 Coat Protein (CP) of an MS2 phage, or the ΦX174 major spike protein G of a ΦX174 phage. In some embodiments, the nucleic acid molecule comprises a mutated phage genome, and can be packaged into the phage capsid formed by the encoded structural proteins.

[0378] In some embodiments, sequences encoding the stand-alone version of the coat protein and sequence encoding the fusion protein containing the coat protein are operably linked to the same expression regulatory element. In other embodiments, sequences encoding the stand-alone version of the coat protein and sequence encoding the fusion protein containing the coat protein are operably linked to different expression regulatory elements. Particularly, the expression regulatory elements are selected to control the expression levels, such that the stand-alone version of the coat protein and the fusion protein comprising the coat protein are produced at a desirable ratio by the host cell or in the cell-free biosynthesis reaction mixture.

[0379] Alternatively, as shown in FIGS. 7 and 8, in some embodiments, the first and second nucleic acid sequences are provided in separate nucleic acid molecules. Particularly, the separate nucleic acid molecules are configured, upon introducing into the host cell or the cell-free biosynthesis reaction mixture, to produce a recombinant nucleic acid molecule comprising both the first and second nucleic acid sequence. Particularly, in the exemplary embodiments shown in the figures, the first nucleic acid sequence comprises homologous recombination sites flanking the location where the second nucleic acid sequence is to be inserted through recombination. Accordingly, the second nucleic acid sequence is flanked by the homologous recombination sites. Then, a site-specific recombinase or recombinase complex in the cell cytoplasm or cell-free biosynthesis reaction mixture catalyzes homologous recombination between the two molecules to produce the recombinant nucleic acid molecule comprising both the first and second nucleic acid sequences. In some embodiments, the functionality of the recombinase is provided by the host cell or the cell-free biosynthesis reaction mixture. In other embodiments, the present system further comprises components for providing the functionality of the recombinase.

[0380] In some embodiments, the first nucleic acid sequence is configured to be packaged into the phage capsid formed by the encoded structural proteins. In some embodiments, the first nucleic acid sequence comprises the phage genome and can be assembled into the capsid formed by the encoded structural proteins. In some embodiments, the phage genome is wild-type. In other embodiments, the phage genome is mutated.

[0381] In particular embodiments, the mutated phage genome sequence does not encode a stand-alone version of a phage coat protein that is selected for displaying other peptide or protein components. Particularly, in some embodiments, the mutated phage genome has one or more null mutations in the endogenous sequence encoding the coat protein. For example, in some embodiments, the endogenous sequence encoding the coat protein is deleted from the phage genome. In some embodiments, a sequence encoding the stand-alone version of the coat protein is replaced by the second nucleic acid sequence encoding the fusion protein comprising the coat protein during the recombination process. In some embodiments, the recombinant nucleic acid molecule is capable of being packaged into the phage capsid formed by the encoded structural proteins.

[0382] In particular embodiments, the mutated phage genome encodes both a stand-alone version of the coat protein as well as a fusion protein comprising the coat protein. In other embodiments, sequences encoding the stand-alone version of the coat protein and sequence encoding the fusion protein containing the coat protein are operably linked to different expression regulatory elements. Particularly, the expression regulatory element are selected to control the expression levels, such that the stand-alone version of the coat protein and the fusion protein comprising the coat protein are produced at a desirable ratio by the host cell or in the cell-free biosynthesis reaction mixture.

[0383] In some embodiments, the genotype of the phage produced as described herein at matches at least partially the phenotype of the phage. In these embodiments, the lasso peptide component displayed on the phage can be identified by analyzing genetic materials of the phage. Accordingly, in some of these embodiments, identification of the lasso peptide component displayed on a phage depends on packaging into the phage capsid a nucleic acid sequence encoding the lasso peptide component. As described herein, in some embodiments, the second nucleic acid sequence encoding the fusion protein comprising the lasso peptide component is packaged into the phage capsid. In some embodiments, a nucleic acid molecule comprising both the first and second nucleic acid sequences are packaged into the phage capsid.

[0384] In other embodiments, the genotype of the phage produced as described herein does not match the phenotype of the phage. In some of these embodiments, an identification mechanism is provided for identifying and/or manipulating the phage, and the lasso peptide component displayed on the phage. For example, in some embodiments, the second nucleic acid sequence further encodes a fusion protein comprising an identification peptide fused to a coat protein of the phage. In various embodiments, the identification peptide is configured to identify and/or manipulate the phage displaying the identification peptide, as well as the lasso peptide component also displayed on the phage. For example, the identification peptide can produce a unique detectable signal identifying the phage or the lasso peptide component. The identification peptide can be a purification tag for isolating and/or enriching the population of phages displaying a lasso peptide component. In another exemplary embodiment, the process for making the phage takes place at a unique location, and the location information can be used to identify the phage and the lasso peptide component displayed thereon. For example, in some embodiments, the lasso-displaying phage is produced in a well of a multi-well plate that is assigned with a unique well ID number.

[0385] Accordingly, in some of these embodiments, identification of the lasso peptide component displayed on a phage does not require packaging into the phage capsid a nucleic acid sequence encoding the lasso peptide component. Thus, in some embodiments, the second sequence encoding the fusion protein comprising the lasso peptide component is not packaged into the phage capsid. For example, in some embodiments, the second sequence does not contain a packaging signal. In some embodiments, the second sequence is not part of a sequence containing a packaging signal.

[0386] In particular embodiments, the first nucleic acid sequence is provided in the form of an expression vector. In some embodiments, the second nucleic acid sequence is provided in the form of an expression vector. In some embodiments, both the first and second nucleic acid sequences are provided in the same expression vector. In some embodiments, the vector containing the first and/or second nucleic sequence is a plasmid. In some embodiments, the phage structural proteins assembled into an empty capsid without any genome sequence, and the phage displays a lasso peptide component on the capsid.

[0387] In particular embodiments, the first nucleic acid sequence but not the second nucleic acid sequence is packaged into the phage capsid, and the phage displays a lasso peptide component on the capsid. In some embodiments, the first nucleic acid sequence comprises a wild-type genome of the phage. In some embodiments, the first nucleic acid sequence comprises a mutated genome of the phage having a null mutation in an endogenous sequence encoding the coat protein. In particular embodiments, the endogenous sequence encoding the coat protein is deleted from the genome.

[0388] As shown in FIG. 9, a lasso-displaying phage can be produced in vitro by contacting a partially assembled phage capsid with a fusion protein comprising the lasso peptide component fused to a selected coat protein of the phage. Particularly, in some embodiments, the selected coat protein is a nonessential outer capsid protein.

[0389] Without being bound by the theory, it is contemplated that in certain phage species only a maximum number of copies of a coat protein can be assembled into one capsid. For example, T4 phage capsid is decorated with 155 copies of Hoc. (Sathaliyawala et al. Journal of Virology, August, 2006, pp. 7688-7698). Thus, in some embodiments, the partially assembled phage capsid is devoid of the selected coat protein, and contacting the partially assembled phage capsid with a population of fusion proteins comprising the coat protein leads to the assembly of up to the maximum number of the fusion proteins onto the phage capsid.

[0390] It is also contemplated that the density of the fusion proteins on the phage capsid can be controlled in various ways. For example, to reduce the density of the fusion proteins on the phage capsid, in some embodiments, the partially assembled phage capsid contains some but less than the maximum number of the coat proteins, and contacting the partially assembled phage capsid with a population of fusion proteins comprising the coat protein leads to the assembly of less than the maximum number of copies of the fusion proteins onto the phage capsid.

[0391] In some embodiment, to reduce the density of the fusion proteins on the phage capsid, the partially assembled phage capsid devoid of the coat protein is contacted with a mixture containing both the stand-alone version of the coat proteins and the fusion protein containing the coat protein. In these embodiments, the stand-alone coat proteins compete with the fusion proteins for assembling onto the phage capsid, and lead to assembly of less than the maximum number of copies of the fusion protein on the phage capsid.

[0392] In particular embodiments, such as shown in the first and second panels of FIGS. 11A, competitive assembly of both a stand-alone coat protein and a fusion protein containing the coat protein can be performed in vivo in a host cell or in vitro using a cell-free biosynthesis reaction mixture. Particularly, as shown in FIG. 11B, a wild-type genome of a phage is introduced into a host cell or a cell-free biosynthesis reaction mixture to produce encoded phage proteins, including a first coat protein of the phage. Also introduced into the host cell or cell-free biosynthesis reaction mixture is a second nucleic acid sequence encoding a fusion protein comprising a lasso peptide component fused to the first coat protein. The encoded phage proteins produced in the cell cytoplasm or cell-free biosynthesis reaction mixture assemble into the capsid in the presence of the fusion protein expressed from the second nucleic acid sequence. Thus, the stand-alone coat protein and the fusion protein compete for assembly on the phage capsid. In some embodiments, the phage is a T4 phage, and the coat protein is HOC or SOC.

[0393] In other embodiments, such as shown in the third panel of FIG. 11A, competitive assembly of both a stand-alone coat protein and a fusion protein containing the coat protein can be performed in vitro by mixing isolated partially assembled phage capsids and protein components together. Particularly, as shown in the figure, the partially assembled phage capsid does not contain a nucleic acid sequence encoding the lasso peptide component in the fusion protein. Particularly, in some embodiments, the partially assembled phage capsid contains a mutated genome devoid of endogenous sequence encoding the coat protein. In some embodiments, the partially assembled phage capsid is produced by introducing a mutated phage genome sequence that does not encode the coat protein into a host cell or a cell-free biosynthesis reaction mixture, followed by culturing the host cell or incubating the cell-free biosynthesis reaction mixture under a suitable condition to produce the partially assembled phage capsid. The partially assembled phage capsid is then isolated and contacted with a mixture of both stand-alone coat proteins and fusion proteins comprising the coat protein for competitive assembly.

[0394] Other methods for controlling the fusion protein density can be envisioned by those of ordinary skills in the art based on the present disclosure. For example, controlling the density of the fusion protein on the phage capsid can be achieved by adjusting the concentration of the partially assembled phage particles and/or the concentration of the fusion proteins that are contacted together. For example, controlling the density of the fusion protein on the phage capsid can be achieved by adjusting the incubation time during which the partially assembled phage capsid and the fusion protein is contacted. For example, controlling the density of the fusion protein on the phage capsid can be achieved by adjusting the ratio of the stand-alone coat protein and the fusion protein in the mixture contacted with the partially assembled phage capsid.

[0395] In various embodiments, the partially assembled phage capsid is further contacted with a fusion protein comprising an identification peptide fused to a coat protein of the phage. In some embodiments, the identification peptide is a purification tag. In some embodiments, the identification peptide produces a detectable signal. In some embodiments, the identification peptide and the lasso peptide components are fused to the same coat protein of the phage. In other embodiments, the identification peptide and the lasso peptide components are fused to different coat proteins of the phage. In various embodiments, contacting the partially assembled phage capsid with one or more fusion proteins occurs in a unique location on a solid support, such as in a well of a multi-well plate.

[0396] As shown in FIG. 10, the lasso peptide component displayed on the phage capsid can be processed by at least one lasso peptide biosynthesis component into a lasso peptide or a functional fragment of lasso peptide. Particularly, in some embodiments, the lasso maturation step can occur in a host cell cytoplasm or a cell-flee biosynthesis reaction mixture where the phage components are expressed and assembled. A third nucleic acid molecule encoding at least one lasso peptide biosynthesis components can be introduced into the same host cell or the cell-free biosynthesis reaction mixture. The lasso peptide biosynthesis components produced in the cell cytoplasm of cell-free biosynthesis reaction mixture then process a lasso precursor peptide or lasso core peptide displayed on the phage capsid into a lasso peptide or functional fragment of lasso peptide. Alternatively, in some embodiments, such as shown in FIG. 5 or FIG. 10 (bottom), a lasso-displaying phage are isolated before contacting with the lasso peptide biosynthesis components. In some embodiments, lasso peptide biosynthesis components are added into the culture medium to process the lasso peptide component displayed on the phage into matured a lasso peptide having the lariat-like structure. In some embodiments, the lasso peptide biosynthesis component is recombinantly produced by a microorganism. In some embodiments, the lasso peptide biosynthesis component is produced by a cell-free biosynthesis system. In some embodiments, the lasso peptide biosynthesis component is chemically synthesized. In some embodiments, the lasso peptide biosynthesis component is purified before contacted with the phage displaying the lasso peptide component. In any of the embodiments described in this paragraph, the lasso peptide component comprises one or more selected from a lasso peptidase, a lasso cyclase and an RRE.

[0397] In various embodiments described herein, one or more of the nucleic acid sequence to be introduced into the host cell encodes a fusion protein. For example, in some embodiments, the nucleic acid sequence encodes a fusion protein comprising a lasso peptide component fused to a phage coat protein. In particular embodiments, the lasso peptide component is fused to the phage coat protein via a linker. In some embodiments, the fusion protein comprises the lasso peptide component fused to a secretion signal. In particular embodiments, the lasso peptide component is fused to a secretion signal via a linker. In some embodiments, the fusion protein comprises the phage coat protein fused to the secretion signal. In particular embodiments, the phage coat protein is fused to the secretion signal via a linker.

[0398] For example, in some embodiments, the nucleic acid sequence encodes a fusion protein comprising a lasso peptide biosynthesis component fused to a secretion signal. In particular embodiments, the lasso peptide biosynthesis component is fused to a secretion signal via a linker. Particularly, in some embodiments, the fusion protein comprises a lasso peptidase fused to a secretion signal. In particular embodiments, the lasso peptidase is fused to a secretion signal via a linker. In some embodiments, the fusion protein comprises a lasso cyclase fused to a secretion signal. In particular embodiments, the lasso cyclase is fused to a secretion signal via a linker. In some embodiments, the fusion protein comprises an RRE fused to a secretion signal. In particular embodiments, the RRE is fused to the secretion signal via a linker.

[0399] For example, in some embodiments, the nucleic acid sequence encodes a fusion protein comprising a lasso peptide biosynthesis component fused to a purification tag. In particular embodiments, the lasso peptide biosynthesis component is fused to a purification tag via a linker. Particularly, in some embodiments, the fusion protein comprises a lasso peptidase fused to a purification tag. In particular embodiments, the lasso peptidase is fused to a purification tag via a linker. In some embodiments, the fusion protein comprises a lasso cyclase fused to a purification tag. In particular embodiments, the lasso cyclase is fused to a purification tag via a linker. In some embodiments, the fusion protein comprises an RRE fused to a purification tag. In particular embodiments, the RRE is fused to the purification tag via a linker.

[0400] For example, in some embodiments, the nucleic acid sequence encodes a fusion protein comprising two or more lasso peptide biosynthesis components fused to each other. In particular embodiments, the two or more lasso peptide biosynthesis components are fused to each other via a linker. Particularly, in some embodiments, the fusion protein comprises a lasso cyclase fused to a lasso peptidase. In particular embodiments, the lasso cyclase is fused to the lasso peptidase via a linker. In some embodiments, the fusion protein comprises a lasso peptidase fused to an RRE via a linker. In particular embodiments, the lasso peptidase is fused to an RRE via a linker. In some embodiments, the fusion protein comprises a lasso cyclase fused to an RRE. In particular embodiments, the lasso cyclase is fused to an RRE via a linker.

[0401] In any of the embodiments described in the above paragraph, the fusion protein may further comprise a purification tag or a secretion signal fused to the lasso peptide biosynthesis component via a linker. For example, in some embodiments, the fusion protein comprises a lasso cyclase, a lasso peptidase and a purification tag. Particularly, in some embodiments, the lasso cyclase is fused to a lasso peptidase via a linker, and further the lasso cyclase or the lasso peptidase is fused to the purification tag via a linker. For example, in some embodiments, the fusion protein comprises a lasso cyclase, an RRE and a secretion signal. Particularly, in some embodiments, the lasso cyclase is fused to the RRE via a linker, and further the lasso cyclase or the RRE is fused to the secretion signal via a linker. For example, in some embodiments, the fusion protein comprises a lasso peptidase, an RRE and a purification tag. Particularly, in some embodiments, the lasso peptidase is fused to the RRE via a linker, and further the lasso peptidase or the RRE is fused to the purification tag via a linker. For example, in some embodiments, the fusion protein comprises a lasso peptidase, an RRE and a secretion signal. Particularly, in some embodiments, the lasso peptidase is fused to the RRE via a linker, and further the lasso peptidase or the RRE is fused to the secretion signal via a linker. For example, in some embodiments, the fusion protein comprises a lasso peptidase, a lasso cyclase, an RRE and a purification tag. Particularly, in some embodiments, one or more connections between the lasso peptidase, lasso cyclase, RRE and/or purification tag is via a linker. For example, in some embodiments, the fusion protein comprises a lasso peptidase, a lasso cyclase, an RRE and a secretion signal. Particularly, in some embodiments, one or more connections between the lasso peptidase, lasso cyclase, RRE and/or secretion signal is via a linker.

[0402] The linker used in any of the embodiments described herein can be a cleavable peptidic linker. Exemplary endo- and exo-proteases that can be used for cleaving the peptidic linker and thus the separation of the different domains of the fusion proteins include but are not limited to Enteropeptidase, Enterokinase, Thrombin, Factor Xa, TEV protease, Rhinovirus 3C protease; a SUMO-specific and aNEDD8-specific protease from Brachypodium distachyon (bdSENP1 and bdNEDP1), the NEDP1 protease from Salmo salar (ssNEDP1), Saccharomyces cerevisiae Atg4p (scAtg4) and Xenopus laevis Usp2 (xlUsp2). Additional examples of proteases and their recognition site (i.e., sequences that can be used to form the peptidic linker) for cleavage can be found in Waugh Protein Expr Purif. 2011 December; 80(2): 283-293. In some embodiments, commercially available proteases and corresponding recognition site sequences can be used in connection with the present disclosure.

[0403] The purification tag used in any of the embodiments described herein can be selected from Albumin-binding protein (ABP), Alkaline Phosphatase (AP), AU1 epitope, AU5 epitope, Bacteriophage 17 epitope (17-tag), Bacteriophage V5 epitope (V5 tag), Biotin-carboxy carrier protein (BCCP), Bluetongue virus tag (B tag), Calmodulin binding peptide (CBP), Chloramphenicol Acetyl Transferase (CAT), Cellulose binding domain (CBD), Chitin binding domain (CBD), Choline-binding domain (CBD), Dihydrofolate reductase (DHFR), E2 epitope, FLAG epitope, Galactose-binding protein (GBP), Green fluorescent protein (GFP), Glu-Glu (EE-tag), Glutathione-S-transferase (GST), Human influenza hemagglutinin (HA), HaloTag®, Histidine affinity tag (HAT), Horseradish peroxidase (HRP), HSV epitope, Ketosteroid isomerase (KSI), KT3 epitope, LacZ, Luciferase, Maltose-binding protein (MBP), Myc epitope, NusA, PDZ ligand, Polyarginine (Arg tag), Polyaspartate (Asp-tag), Polycysteine (Cys-tag), Polyhistidine (His-tag), Polyphenylalanine (Poly-tag), Profinity eXact™, Protein C, S1 tag, S-tag, Streptavidin-binding peptide (SBP), Staphylococcal protein A (Protein A), Staphylococcal protein G (Protein G), Strep-tag, Streptavidin, Small Ubiquitin-like Modifier (SUMO), Tandem Affinity Purification (TAP), T7 epitope, Thioredoxin (Trx), TrpE, Ubiquitin, Universal, or VSV-G.

### 5.3.6.1 Genomic Mining Tools for Genes Coding Natural Lasso Peptides

[0404] According to the present disclosure, nucleic acid sequences encoding the lasso peptide component and/or the lasso peptide biosynthesis component can derive from naturally existing lasso peptide biosynthetic gene clusters.

[0405] Some naturally existing lasso peptides are encoded by a lasso peptide biosynthetic gene cluster, which typically comprises three main genes: one encodes for a lasso precursor peptide (referred to as Gene A), and two encode for processing enzymes including a lasso peptidase (referred to as Gene B) and a lasso cyclase (referred to as Gene C). The lasso precursor peptide comprises a lasso core peptide and additional peptidic fragments known as the “leader sequence” that facilitates recognition and processing by the processing enzymes. The leader sequence may determine substrate specificity of the processing enzymes. The processing enzymes encoded by the lasso peptide gene cluster convert the lasso precursor peptide into a matured lasso peptide having the lariat-like topology. Particularly, the lasso peptidase removes additional sequences from the precursor peptide to generate a lasso core peptide, and the lasso cyclase cyclizes a terminal portion of the core peptide around a terminal tail portion to form the lariat-like topology. Some lasso gene clusters further encodes for additional protein elements that facilitates the post-translational modification, including a facilitator protein known as the post-translationally modified peptide (RiPP) recognition element (RRE). Some lasso gene clusters further encodes for lasso peptide transporters, kinases, acetyltransferases, or proteins that play a role in immunity, such as isopeptidase. (Burkhart, B. J., et al., Nat. Chem. Biol., 2015, 11, 564-570; Knappe, T. A. et al., J. Am. Chem. Soc., 2008, 130, 11446-11454; Solbiati, J. O. et al. J. Bacteriol., 1999, 181, 2659-2662; Fage, C. D., et al., Angew. Chem. Int. Ed., 2016, 55, 12717-12721; Zhu, S., et al., J. Biol. Chem. 2016, 291, 13662-13678; Zong, C. et al., Chem Commun (Camb), 2018; 54(11), 1339-1342).

[0406] Computer-based genome-mining tools can be used to identify lasso biosynthetic gene clusters based on known genomic information. For example, one algorithm known as RODEO can rapidly analyze a large number of biosynthetic gene clusters (BGCs) by predicting the function for genes flanking query proteins. This is accomplished by retrieving sequences from GenBank followed by analysis with HMMER3. The results are compared against the Pfam database with the data being returned to the users in the form of spreadsheet. For analysis of BGCs not encoding proteins not covered by Pfam, RODEO allows usage of additional pH Ms (either curated databases or user-generated). Taking advantage of RODEO's ability to rapidly analyze genes neighboring a query, it is possible to compile a list of all observable lasso peptide biosynthetic gene clusters in GeneBank (Online Methods). A comprehensive evaluation of this data set would provide great insight into the lasso peptide family. Lasso peptide biosynthetic gene clusters can be identified by looking for the local presence of genes encoding proteins matching the Pfams for the lasso cyclase, lasso peptidase, and RRE.

[0407] To confidently predict lasso precursors, RODEO next performed a six-frame translation of the intergenic regions within each of the identified potential lasso biosynthetic gene clusters. The resulting peptides can be assessed based on length and essential sequence features and split into predicted leader and core regions. A series of heuristics based on known lasso peptide characteristics can be defined to predict precursors from a pool of false positives. After optimization of heuristic scoring, good prediction accuracy for biosynthetic gene clusters closely related to known lasso peptides can be obtained.

[0408] Machine learning, particularly, support vector machine (SVM) classification, would be effective in locating precursor peptides from predicted BGCs more distant to known lasso peptides. SVM is well-suited for RiPP discovery due to availability of SVM libraries that perform well with large data sets with numerous variables and the ability of SVM to minimize unimportant features. The SVM classifier can be optimized using a randomly selected and manually curated training set from the unrefined whole data. Of these, a random subpopulation was withheld as a test set to avoid over-fitting. By combining SVM classification with motif (MEME) analysis, along with our original heuristic scoring, prediction accuracy was greatly enhanced as evaluated by recall and precision metrics. This tripartite procedure can yield a high-scoring, well-separated population of lasso precursor peptide from candidate peptides. The training set was found to display nearly identical scoring distributions upon comparison to the full data set.

[0409] Other examples of genomic or biosynthetic gene search engine that can be used in connection with the present disclosure include the WARP DRIVE BIO™ software, anti-SMASH (ANTI-SMASH™) software (See: Min, K., et al., Nucleic Acids Res., 2017, 45, W36-W41), iSNAP™ algorithm (See: Ibrahim, A., et al., Proc. Nat. Acad. Sci., USA., 2012, 109, 19196-19201), CLUSTSCAN™ (Starcevic, et al., Nucleic Acids Res., 2008, 36, 6882-6892), NP searcher (Li et al. (2009) Automated genome mining for natural products. BMC Bioinformatics, 10, 185), SBSPKS™ (Anand, et al. Nucleic Acids Res., 2010, 38, W487 W496), BAGEL3™ (Van Heel, et al., Nucleic Acids Res., 2013, 41, W448-W453), SMURF™ (Khaldi et al., Fungal Genet. Biol., 2010, 47, 736-741), ClusterFinder (CLUSTERFINDER™) or ClusterBlast (CLUSTERBLAST™) algorithms, and an Integrated Microbial Genomes (IMG)-ABC system (DOE Joint Genome Institute (JGI)). In some embodiments, lasso peptide biosynthetic gene clusters for use in CFB methods and processes as provided herein are identified by mining genome sequences of known bacterial natural product producers using established genome mining tools, such as anti-SMASH, BAGEL3, and RODEO. These genome mining tools can also be used to identify novel biosynthetic genes within metagenomic based DNA sequences. Lasso peptide biosynthetic gene clusters can be used in the methods and systems described herein to produce various lasso peptides and libraries of lasso peptides.

[0410] 5.3.6.2 Diversifying Lasso Peptides

[0411] In some embodiments, the present system and methods are configured to produce a phage display library comprising a plurality of distinct species of lasso peptide component. In some embodiments, the present systems are used to facilitate the creation of mutational variants of lasso peptides using methods involving, for example, the synthesis of codon mutants of the lasso precursor peptide or lasso core peptide gene sequence. Lasso precursor peptide or lasso core peptide gene or oligonucleotide mutants can be introduced into the host organism, thus enabling the creation of a phage population displaying highly diversified lasso peptide components. In some embodiments, the present system and methods are used to facilitate the creation of large mutational lasso peptide libraries using, for example, site-saturation mutagenesis and recombination methods. In some embodiments, the present system and method are used to facilitate the creation of mutational variants of lasso peptides by introducing non-natural amino acids into the core peptide sequence, followed by formation of the lasso structure as described herein.

[0412] Without being bound by the theory, it is contemplated that different lasso peptidase can process the same lasso precursor peptide into different lasso core peptide by recognizing and cleaving different leader peptide off the lasso precursor. Additionally, different lasso cyclase can process the same lasso core peptide into distinct lasso peptides by cyclizing the core peptide at different ring-forming amino acid residues. Additionally, different RREs can facilitate different processing by the lasso peptidase and/or lasso cyclase, and thus lead to formation of distinct lasso peptides from the same lasso precursor peptide.

[0413] Accordingly, in some embodiments, to produce a natural lasso peptide, the nucleic acid sequences encoding the lasso precursor peptide, lasso peptidase, and lasso cyclase are derived from the same lasso peptide biosynthetic gene cluster (such as Genes A, B, and C of the same lasso peptide biosynthetic gene cluster). In some embodiments, to produce a natural lasso peptide, the nucleic acid sequences encoding the lasso precursor peptide, lasso peptidase, lasso cyclase, and RRE are derived from coding sequences of the same lasso peptide biosynthetic gene cluster.

[0414] In some embodiments, to produce a natural lasso peptide, the nucleic acid sequences coding the lasso core peptide, and lasso cyclase are derived from coding sequences of the same lasso peptide biosynthetic gene cluster (such as Genes A and C of the same lasso peptide biosynthetic gene cluster). In some embodiments, to produce a natural lasso peptide, the nucleic acid sequences coding the lasso core peptide, lasso cyclase, and RRE are derived from coding sequences of the same lasso peptide biosynthetic gene cluster.

[0415] In alternative embodiments, to produce a derivative of a natural lasso peptide, at least two of the nucleic acid sequences encoding the lasso precursor peptide, lasso peptidase and lasso cyclase are derived from coding sequences of different lasso peptide biosynthetic gene clusters (such as Gene A from one, and Genes B and C from another, lasso peptide biosynthetic gene cluster). In alternative embodiments, to produce a derivative of a natural lasso peptide, at least two of the nucleic acid sequences encoding the lasso precursor peptide, lasso peptidase, lasso cyclase and RRE are derived from coding sequences of different lasso peptide biosynthetic gene clusters.

[0416] In alternative embodiments, to produce a derivative of a natural lasso peptide, the nucleic acid sequences encoding the lasso core peptide and lasso cyclase are derived from coding sequences of different lasso peptide biosynthetic gene clusters (such as Gene A from one, and Gene C from another, lasso peptide biosynthetic gene cluster). In alternative embodiments, to produce a derivative of a natural lasso peptide, at least two of the nucleic acid sequences encoding the lasso core peptide, lasso cyclase and RRE are derived from coding sequences of different lasso peptide biosynthetic gene clusters.

[0417] In some embodiments, the coding sequences derived from the lasso peptide biosynthesis component are mutated in order to further diversify the lasso peptide species presented in the phage display library.

[0418] In some embodiments, the nucleic acid sequence coding for the lasso peptide component is derived from a natural sequence, such as a Gene A sequence or open reading frame thereof. In some embodiments, a plurality of nucleic acid sequences coding for the lasso peptide component are derived from the same or different natural sequences. In specific embodiments, derivation of a nucleic acid sequence (e.g., a Gene A sequence) is performed by introducing one or more mutation(s) to the nucleic acid sequence. In various embodiments, the one or more mutation(s) are one or more selected from amino acid substitution, deletion, and addition. In various embodiments, the one or more mutation(s) can be introduced using mutation methods described herein and/or known in the art.

[0419] Particularly, in specific embodiments, a plurality of coding sequences each encoding a different lasso peptide component is provided. In some embodiments, the plurality of coding sequences comprise sequences from a plurality of different lasso peptide biosynthetic gene clusters (such as a plurality of different Gene A sequences or open reading flames thereof). In some embodiments, the plurality of coding sequences are derived from one or more Gene A sequences or open reading frames thereof.

[0420] In some embodiments, the plurality of coding sequences are derived from the same Gene A sequence or open reading flame thereof. In specific embodiments, to produce a library comprising diversified species of lasso peptides, a coding sequence of lasso precursor peptide of interest is mutated to produce a plurality of coding sequences encoding lasso peptide components having different amino acid sequences. In some embodiments, a lasso peptide having one or more desirable target properties is selected, and its corresponding precursor peptide is used as the initial scaffold to generate the diversified species of precursor peptides in a library. In some embodiments, one or more mutation(s) are introduced by methods of directed mutagenesis. In alternative embodiments, one or more mutation(s) are introduced by methods of random mutagenesis.

[0421] Without being bound by the theory, it is contemplated that the leader sequence of a lasso precursor peptide is recognized by the lasso processing enzymes and can determine specificity and selectivity of the enzymatic activity of the lasso peptidase or lasso cyclase. Accordingly, in some embodiments, only the core peptide portion of the lasso precursor peptide is mutated, while the leader sequence remains unchanged. In some embodiments, the leader sequence of a lasso precursor peptide is replaced by the leader sequence of a different lasso precursor peptide.

[0422] Without being bound by theory, it is contemplated that certain lasso cyclases can cyclize the lasso core peptide by joining the N-terminal amino group with the carboxyl group on side chains of glutamate or aspartate residue located at the 7^{th}, 8^{th} or 9^{th} position (counting from the N-terminus) in the core peptide. Accordingly, in some embodiments, random mutations can be introduced to any amino acid residues in a lasso core peptide, or a core peptide region of a lasso precursor peptide, except that at least one of the 7^{th}, 8^{th} or 9^{th} positions (counting from the N-terminus) in the lasso core peptide or core peptide region of a lasso precursor has a glutamate or aspartate residue. In some embodiments, a glutamate residue is introduced to the 7^{th}, 8^{th} or 9^{th} positions (counting from the N-terminus) in the lasso core peptide or core peptide region of a lasso precursor by amino acid addition or amino acid substitution mutations using the methods described herein and/or known in the art. In some embodiments, an aspartate residue is introduced to the 7^{th}, 8^{th} or 9^{th} positions (counting from the N-terminus) in the lasso core peptide or core peptide region of a lasso precursor by amino acid addition or amino acid substitution mutations using the methods described herein and/or known in the art.

[0423] Without being bound by theory, it is contemplated that intra-peptide disulfide bond(s), including one or more disulfide bonds (i) between the loop and the ring portions, (ii) between the ring and tail portions, (iii) between the loop and tail portions, and/or (iv) between different amino acid residues of the tail portion of a lasso peptide can contribute to maintain or improve stability of the lariat-like topology of a lasso peptide. Accordingly, in some embodiments, a lasso core peptide or lasso precursor peptide is engineered to have at least two cysteine residues. In specific embodiments, at least two cysteine residues locate on the loop and ring portions of a lasso peptide, respectively. In specific embodiments, at least two cysteine residues locate on the ring and tail portions of a lasso peptide, respectively. In specific embodiments, the at least two cysteine residues locate on the loop and tail portions of a lasso peptide, respectively. In specific embodiments, at least two cysteine residues locate on tail portion of a lasso peptide, respectively. In various embodiments, one or more cysteine residues as described herein are introduced to the nucleic acid sequence of a lasso peptide by amino acid addition or amino acid substitution mutations using the methods described herein and/or known in the art.

[0424] Without being bound by theory, it is contemplated that steric effects (e.g., steric hindrance) can contribute to maintain or improve stability of the lariat-like topology of a lasso peptide. Accordingly, in some embodiments, amino acid residues having sterically bulky side chains are located and/or introduced to the locations in the lasso core peptide or the core peptide region of a lasso precursor peptide that are in close proximity to the plane of the ring. In some embodiments, at least one amino acid residue(s) having sterically bulky side chains are located and/or introduced to the tail portion of the lasso peptide. In particular embodiments, multiple bulky amino acids can be consecutive amino acid residues in the tail portion of the lasso peptide. The bulky amino acid residue(s) prevent the tail from unthreading from the ring. In some embodiments, amino acid residue(s) having sterically side chains are located and/or introduced to both the loop and the tail portions of the lasso peptide. In particular embodiments, a bulky amino acid residue in the loop portion is away from a bulky amino acid residue in the tail portion of the lasso peptide by at least 1 non-bulky amino acid residues. In particular embodiments, a bulky amino acid residue in the loop portion is away from a bulky amino acid residue in the tail portion of the lasso peptide by about 2, 3, 4, 5, or 6 non-bulky amino acid residues. In various embodiments, one or more sterically bulky amino acid residues as described herein are introduced to the nucleic acid sequence of a lasso peptide by amino acid addition or amino acid substitution mutations using the methods described herein and/or known in the art.

[0425] Various methods have been developed for mutagenesis of genes. A few examples of such mutagenesis methods are provided below. One or more of these methods can be used in connection with the present disclosure to produced diversified nucleic acids sequences coding for different lasso precursor peptides or lasso core peptides, which can be used to produce libraries of lasso peptides using the CFB methods and systems described herein.

[0426] Error-prone PCR, or epPCR (Pritchard, L., D. Come, D. Kell, J. Rowland, and M. Winson, 2005, A general model of error-prone PCR J Theor. Biol 234:497-509), introduces random point mutations by reducing the fidelity of DNA polymerise in PCR reactions by the addition of Mn²⁺ ions, by biasing dNTP concentrations, or by other conditional variations. The five step cloning process to confine the mutagenesis to the target gene of interest involves: 1) error-prone PCR amplification of the gene of interest; 2) restriction enzyme digestion; 3) gel purification of the desired DNA fragment; 4) ligation into a vector; 5) expression of the gene variants using a CFB system and screening of the library of expressed lasso peptides for improved performance. This method can generate multiple mutations in a single gene or coding sequence simultaneously, which can be useful. A high number of mutants can be generated by epPCR, so a high-throughput screening assay or a selection method (especially using robotics) is useful to identify those with desirable characteristics.

[0427] Error-prone Rolling Circle Amplification (epRCA) (Fujii, R, M. Kitaoka, and K. Hayashi, 2004, One-step random mutagenesis by error-prone rolling circle amplification. Nucleic Acids Res 32:e 145; and Fujii, R., M. Kitaoka, and K. Hayashi, 2006, Error-prone rolling circle amplification: the simplest random mutagenesis protocol. Nat. Protoc. 1:2493-2497.) has many of the same elements as epPCR except a whole circular plasmid is used as the template and random 6-mers with exonuclease resistant thiophosphate linkages on the last 2 nucleotides are used to amplify the plasmid followed by expression of the variants in a CFB system, in which the plasmid is re-circularized at tandem repeats. Adjusting the Mn²⁺ concentration can vary the mutation rate somewhat. This technique uses a simple error-prone, single-step method to create a full copy of the plasmid with 3-4 mutations/kbp. No restriction enzyme digestion or specific primers are required. Additionally, this method is typically available as a kit.

[0428] DNA or Family Shuffling (Stemmer, W. P. 1994, DNA shuffling by random fragmentation and reassembly: in vitro recombination for molecular evolution. Proc Natl Acad Sci US.A 91:10747-10751; and Stemmer, W. P. 1994. Rapid evolution of a protein in vitro by DNA shuffling Nature 370:389-391.) typically involves digestion of 2 or more variant genes or coding sequences with nucleases such as DNase I or EndoV to generate a pool of random fragments that are reassembled by cycles of annealing and extension in the presence of DNA polymerase to create a library of chimeric genes. Fragments prime each other and recombination occurs when one copy primes another copy (template switch). This method can be used with >1 kbp DNA sequences. In addition to mutational recombinants created by fragment reassembly, this method introduces point mutations in the extension steps at a rate similar to error-prone PCR.

[0429] Staggered Extension (StEP) (Zhao, H., L. Giver, Z. Shao, J. A. Affholter, and F. H. Arnold, 1998, Molecular evolution by staggered extension process (StEP) in vitro recombination. Nat. Biotechnol., 16:258-261.) entails template priming followed by repeated cycles of 2-step PCR with denaturation and very short duration of annealing/extension (as short as 5 sec). Growing fragments anneal to different templates and extend further, which is repeated until full-length sequences are made. Template switching means most resulting fragments have multiple parents. Combinations of low-fidelity polymerases (Taq and Mutazyme) reduce error-prone biases because of opposite mutational spectra.

[0430] In Random Priming Recombination (RPR) random sequence primers are used to generate many short DNA fragments complementary to different segments of the template. (Shao, Z., H. Zhao, L. Giver, and F. H. Arnold, 1998, Random-priming in vitro recombination: an effective tool for directed evolution. Nucleic Acids Res, 26:681-683.) Base misincorporation and mispriming via epPCR give point mutations. Short DNA fragments prime one another based on homology and are recombined and reassembled into full-length by repeated thermocycling. Removal of templates prior to this step assures low parental recombinants. This method, like most others, can be performed over multiple iterations to evolve distinct properties. This technology avoids sequence bias, is independent of gene length, and requires very little parent DNA for the application.

[0431] In Heteroduplex Recombination linearized plasmid DNA is used to form heteroduplexes that are repaired by mismatch repair. (Volkov, A. A., Z. Shao, and F. H. Arnold. 1999. Recombination and chimeragenesis by in vitro heteroduplex formation and in vivo repair. Nucleic Acids Res, 27:e18; and Volkov, A. A., Z. Shao, and F. H. Arnold. 2000. Random chimeragenesis by heteroduplex recombination. Methods Enzymol., 328:456-463.) The mismatch repair step is at least somewhat mutagenic. Heteroduplexes transform more efficiently than linear homoduplexes. This method is suitable for large genes and whole operons.

[0432] Random Chimeragenesis on Transient Templates (RACHTIT) (Coco, W. M., W. E. Levinson, M. J. Crist, H. J. Hektor, A. Darzins, P. T. Pienkos, C. H. Squires, and D. J. Monticello, 2001, DNA shuffling method for generating highly recombined genes and evolved enzymes. Nat. Biotechnol., 19:354-359.) employs DNase I fragmentation and size fractionation of ssDNA. Homologous fragments are hybridized in the absence of polymerase to a complementary ssDNA scaffold. Any overlapping unhybridized fragment ends are trimmed down by an exonuclease. Gaps between fragments are filled in, and then ligated to give a pool of full-length diverse strands hybridized to the scaffold (that contains U to preclude amplification). The scaffold then is destroyed and is replaced by a new strand complementary to the diverse strand by PCR amplification. The method involves one strand (scaffold) that is from only one parent while the priming fragments derive from other genes; the parent scaffold is selected against. Thus, no reannealing with parental fragments occurs. Overlapping fragments are trimmed with an exonuclease. Otherwise, this is conceptually similar to DNA shuffling and StEP. Therefore, there should be no siblings, few inactives, and no unshuffled parentals. This technique has advantages in that few or no parental genes are created and many more crossovers can result relative to standard DNA shuffling.

[0433] Recombined Extension on Truncated templates (RE 1′1) entails template switching of unidirectionally growing strands from primers in the presence of unidirectional ssDNA fragments used as a pool of templates. (Lee, S. H., E. J. Ryu, M. J. Kang, E.-S. Wang, Z. C. Y. Piao, K. J. J. Jung, and Y. Shin, 2003, A new approach to directed gene evolution by recombined extension on truncated templates (RETT). J. Molec. Catalysis 26:119-129.) No DNA endonucleases are used. Unidirectional ssDNA is made by DNA polymerase with random primers or serial deletion with exonuclease. Unidirectional ssDNA are only templates and not primers. Random priming and exonucleases don't introduce sequence bias as true of enzymatic cleavage of DNA shuffling/RACHTIT. RETT can be easier to optimize than StEP because it uses normal PCR conditions instead of very short extensions. Recombination occurs as a component of the PCR steps—no direct shuffling. This method can also be more random than StEP due to the absence of pauses.

[0434] In Degenerate Oligonucleotide Gene Shuffling (DOGS) degenerate primers are used to control recombination between molecules; (Bergquist, P. L. and M. D. Gibbs, 2007, Degenerate oligonucleotide gene shuffling Methods Mol. Biol., 352:191-204; Bergquist, P. L., R A. Reeves, and M. D. Gibbs, 2005, Degenerate oligonucleotide gene shuffling (DOGS) and random drift mutagenesis (RNDM): two complementary techniques for enzyme evolution. Biomol. Eng., 22:63-72; Gibbs, M. D., K. M. Nevalainen, and P. L. Bergquist, 2001, Degenerate oligonucleotide gene shuffling (DOGS): a method for enhancing the frequency of recombination with family shuffling Gene 271:13-20.) this can be used to control the tendency of other methods such as DNA shuffling to regenerate parental genes. This method can be combined with random mutagenesis (epPCR) of selected gene segments. This can be a good method to block the reformation of parental sequences. No endonucleases are needed. By adjusting input concentrations of segments made, one can bias towards a desired backbone. This method allows DNA shuffling from unrelated parents without restriction enzyme digests and allows a choice of random mutagenesis methods.

[0435] Incremental Truncation for the Creation of Hybrid Enzymes (ITCHY) creates a combinatorial library with 1 base pair deletions of a gene or gene fragment of interest. (Ostermeier et al., Proc. Natl. Acad. Sci. US.A. 96:3562-3567 (1999); Ostermeier et al., 1999 Nat. Biotechnol., 17:1205-1209 (1999)) Truncations are introduced in opposite direction on pieces of 2 different genes. These are ligated together and the fusions are cloned. This technique does not require homology between the 2 parental genes. When ITCHY is combined with DNA shuffling, the system is called SCRATCHY (see below). A major advantage of both is no need for homology between parental genes; for example, functional fusions between an E. coli and a human gene were created via ITCHY. When ITCHY libraries are made, all possible crossovers are captured.

[0436] Thio-Incremental Truncation for the Creation of Hybrid Enzymes (TRIO-ITCHY) is almost the same as ITCHY except that phosphothioate dNTPs are used to generate truncations. (Lutz, S., M. Ostermeier, and S. J. Benkovic, 2001, Rapid generation of incremental truncation libraries for protein engineering using alpha-phosphothioate nucleotides. Nucleic Acids Res 29:E16.) Relative to ITCHY, TRIO-ITCHY can be easier to optimize, provide more reproducibility, and adjustability.

[0437] SCRATCHY-ITCHY combined with DNA shuffling is a combination of DNA shuffling and ITCHY; therefore, allowing multiple crossovers. (Lutz et al., Proc. Natl. Acad. Sci. US.A. 98:11248-11253 (2001).) SCRATCHY combines the best features of ITCHY and DNA shuffling Computational predictions can be used in optimization. SCRATCHY is more effective than DNA shuffling when sequence identity is below 80%.

[0438] In Random Drift Mutagenesis (RNDM) mutations made via epPCR followed by screening/selection for those retaining usable activity. (Bergquist et al., Biomol. Eng., 22:63-72 (2005)) Then, these are used in DOGS to generate recombinants with fusions between multiple active mutants or between active mutants and some other desirable parent. Designed to promote isolation of neutral mutations; its purpose is to screen for retained catalytic activity whether or not this activity is higher or lower than in the original gene. RNDM is usable in high throughput assays when screening is capable of detecting activity above background. RNDM has been used as a front end to DOGS in generating diversity. The technique imposes a requirement for activity prior to shuffling or other subsequent steps; neutral drift libraries are indicated to result in higher/quicker improvements in activity from smaller libraries. Though published using epPCR, this could be applied to other large-scale mutagenesis methods.

[0439] Sequence Saturation Mutagenesis (SeSaM) is a random mutagenesis method that: 1) generates pool of random length fragments using random incorporation of a phosphothioate nucleotide and cleavage; this pool is used as a template to 2) extend in the presence of “universal” bases such as inosine; 3) replication of a inosine-containing complement gives random base incorporation and, consequently, mutagenesis. (Wong et al., Biotechnol J. 3:74-82 (2008); Wong Nucleic Acids Res 32:e26; Wong et al., Anal. Biochem., 341:187-189 (2005).) Using this technique it can be possible to generate a large library of mutants within 2-3 days using simple methods. This is very non-directed compared to mutational bias of DNA polymerases. Differences in this approach makes this technique complementary (or alternative) to epPCR

[0440] In Synthetic Shuffling, overlapping oligonucleotides are designed to encode “all genetic diversity in targets” and allow a very high diversity for the shuffled progeny. (Ness, et al., Nat. Biotechnol., 20:1251-1255 (2002)) In this technique, one can design the fragments to be shuffled. This aids in increasing the resulting diversity of the progeny. One can design sequence/codon biases to make more distantly related sequences recombine at rates approaching more closely related sequences and it doesn't require possessing the template genes physically.

[0441] Nucleotide Exchange and Excision Technology NexT exploits a combination of dUTP incorporation followed by treatment with uracil DNA glycosylase and then piperidine to perform endpoint DNA fragmentation. (Muller et al., Nucleic Acids Res 33:e117 (2005)) The gene is reassembled using internal PCR primer extension with proofreading polymerase. The sizes for shuffling are directly controllable using varying dUTP::dTTP ratios. This is an end point reaction using simple methods for uracil incorporation and cleavage. One can use other nucleotide analogs such as 8-oxo-guanine with this method. Additionally, the technique works well with very short fragments (86 bp) and has a low error rate. Chemical cleavage of DNA means very few unshuffled clones.

[0442] In Sequence Homology-Independent Protein Recombination (SHIPREC) a linker is used to facilitate fusion between 2 distantly/unrelated genes; nuclease treatment is used to generate a range of chimeras between the two. Result is a single crossover library of these fusions. (Sieber, V., C. A. Martinez, and F. H. Arnold. 2001. Libraries of hybrid proteins from distantly related sequences. Nat. Biotechnol., 19:456-460.) This produces a limited type of shuffling; mutagenesis is a separate process. This technique can create a library of chimeras with varying factions of each of 2 unrelated parent genes. No homology is needed. SHIPREC was tested with a heme-binding domain of a bacterial CP450 fused to N-terminal regions of a mammalian CP450; this produced mammalian activity in a more soluble enzyme.

[0443] Saturation mutagenesis is a random mutagenesis technique, in which a single codon or set of codons is randomised to produce all possible amino acids at the position. Saturation mutagenesis is commonly achieved by artificial gene synthesis, with a mixture of nucleotides used at the codons to be randomised. Different degenerate codons can be used to encode sets of amino acids. Because some amino acids are encoded by more codons than others, the exact ratio of amino acids cannot be equal. Additionally, it is usual to use degenerate codons that minimise stop codons (which are generally not desired). Consequently, the fully randomised ‘NNN’ is not ideal, and alternative, more restricted degenerate codons are used. ‘NNK’ and ‘NNS’ have the benefit of encoding all 20 amino acids, but still encode a stop codon 3% of the time. Alternative codons such as ‘NDT’, ‘DBK’ avoid stop codons entirely, and encode a minimal set of amino acids that still encompass all the main biophysical types (anionic, cationic, aliphatic hydrophobic, aromatic hydrophobic, hydrophilic, small).

[0444] Gene Reassembly is a DNA shuffling method that can be applied to multiple genes at one time or to creating a lie library of chimeras (multiple mutations) of a single gene. Typically this technology is used in combination with ultra-high-throughput screening to query the represented sequence space for desired improvements. This technique allows multiple gene recombination independent of homology. The exact number and position of cross-over events can be pre-determined using fragments designed via bioinformatic analysis. This technology leads to a very high level of diversity with virtually no parental gene reformation and a low level of inactive genes. Combined with GSSM, a large range of mutations can be tested for improved activity. The method allows “blending” and “fine tuning” of DNA shuffling, e.g. codon usage can be optimized.

[0445] In Gene Site Saturation Mutagenesis (GSSM) the starting materials are a supercoiled dsDNA plasmid with insert and 2 primers degenerate at the desired site for mutations. (Kretz, K. A., T. H. Richardson, K. A. Gray, D. E. Robertson, X. Tan, and J. M. Short, 2004, Gene site saturation mutagenesis: a comprehensive mutagenesis approach. Methods Enzymol., 388:3-11.) Primers carry the mutation of interest and anneal to the same sequence on opposite strands of DNA; mutation in the middle of the primer and ˜20 nucleotides of correct sequence flanking on each side. The sequence in the primer is NNN or NNK (coding) and MNN (noncoding) (N=all 4, K=G, T, M=A, C). After extension, DpnI is used to digest dam-methylated DNA to eliminate the wild-type template. This technique explores all possible amino acid substitutions at a given locus (i.e., one codon). The technique facilitates the generation of all possible replacements at one site with no nonsense codons and equal or near-equal representation of most possible alleles. It does not require prior knowledge of structure, mechanism, or domains of the target enzyme. If followed by shuffling or Gene Reassembly, this technology creates a diverse library of recombinants containing all possible combinations of single-site up-mutations. The utility of this technology combination has been demonstrated for the successful evolution of over 50 different enzymes, and also for more than one property in a given enzyme.

[0446] Combinatorial Cassette Mutagenesis (CCM) involves the use of short oligonucleotide cassettes to replace limited regions with a large number of possible amino acid sequence alterations. (Reidhaar-Olson, J. F., J. U. Bowie, R M. Breyer, J. C. Hu, K. L. Knight, W. A. Lim, M. C. Mossing, D. A. Parsell, K. R Shoemaker, and R T. Sauer, 1991, Random mutagenesis of protein sequences using oligonucleotide cassettes. Methods Enzymol., 208:564-586; and Reidhaar-Olson, J. F. and R T. Sauer, 1988, Combinatorial cassette mutagenesis as a probe of the informational content of protein sequences. Science 241:53-57.) Simultaneous substitutions at 2 or 3 sites are possible using this technique. Additionally, the method tests a large multiplicity of possible sequence changes at a limited range of sites. It has been used to explore the information content of lambda repressor DNA-binding domain.

[0447] Combinatorial Multiple Cassette Mutagenesis (CMCM) is essentially similar to CCM except it is employed as part of a larger program: 1) Use of epPCR at high mutation rate, 2) Identification of hot spots and hot regions and then 3) extension by CMCM to cover a defined region of protein sequence space. (Reetz, M. T., S. Wilensek, D. Zha, and K. E. Jaeger, 2001, Directed Evolution of an Enantioselective Enzyme through Combinatorial Multiple-Cassette Mutagenesis. Angew. Chem. Int. Ed Engl. 40:3589-3591.) As with CCM, this method can test virtually all possible alterations over a target region. If used along with methods to create random mutations and shuffled genes, it provides an excellent means of generating diverse, shuffled proteins. This approach was successful in increasing, by 51-fold, the enantioselectivity of an enzyme.

[0448] In the Mutator Strains technique conditional is mutator plasmids allow increases of 20- to 4000-X in random and natural mutation frequency during selection and to block accumulation of deleterious mutations when selection is not required. (Selifonova, O., F. Valle, and V. Schellenberger, 2001, Rapid evolution of novel traits in microorganisms. Appl Environ Microbiol., 67:3645-3649.) This technology is based on a plasmid-derived mutD5 gene, which encodes a mutant subunit of DNA polymerase III. This subunit binds to endogenous DNA polymerise III and compromises the proofreading ability of polymerise III in any of the strain that harbors the plasmid. A broad-spectrum of base substitutions and frameshift mutations occur. In order for effective use, the mutator plasmid should be removed once the desired phenotype is achieved; this is accomplished through a temperature sensitive origin of replication, which allows plasmid curing at 41° C. It should be noted that mutator strains have been explored for quite some time (e.g., see Winter and coworkers, 1996, J. Mol. Biol. 260, 359-3680. In this technique very high spontaneous mutation rates are observed. The conditional property minimizes non-desired background mutations. This technology could be combined with adaptive evolution to enhance mutagenesis rates and more rapidly achieve desired phenotypes.

[0449] “Look-Through Mutagenesis (LTM) is a multidimensional mutagenesis method that assesses and optimizes combinatorial mutations of selected amino acids.” (Rajpal, A., N. Beyaz, L. Haber, G. Cappuccilli, H. Yee, R R Bhatt, T. Takeuchi, R A. Lerner, and R Crea, 2005, A general method for greatly improving the affinity of antibodies by using combinatorial libraries. Proc. Natl. Acad. Sci. USA., 102:8466-8471.) Rather than saturating each site with all possible amino acid changes, a set of 9 is chosen to cover the range of amino acid R group chemistry. Fewer changes per site allows multiple sites to be subjected to this type of mutagenesis. A >800-fold increase in binding affinity for an antibody from low nanomolar to picomolar has been achieved through this method. This is a rational approach to minimize the number of random combinations and should increase the ability to find improved traits by greatly decreasing the numbers of clones to be screened. This has been applied to antibody engineering, specifically to increase the binding affinity and/or reduce dissociation. The technique can be combined with either screens or selections.

[0450] In Silico Protein Design Automation PDA is an optimization algorithm that anchors the structurally defined protein backbone possessing a particular fold, and searches sequence space for amino acid substitutions that can stabilize the fold and overall protein energetics. (Hayes, R. J., J. Bentzien, M. L. Ary, M. Y. Hwang, J. M. Jacinto, J. Vielmetter, A. Kundu, and B. I. Dahiyat, 2002, Combining computational and experimental screening for rapid optimization of protein properties. Proc. Natl. Acad. Sci. USA., 99:15926-15931.) This technology allows in silico structure-based entropy predictions in order to search for structural tolerance toward protein amino acid variations. Statistical mechanics is applied to calculate coupling interactions at each position—structural tolerance toward amino acid substitution is a measure of coupling. Ultimately, this technology is designed to yield desired modifications of protein properties while maintaining the integrity of structural characteristics. The method computationally assesses and allows filtering of a very large number of possible sequence variants (10⁵⁰). Choice of sequence variants to test is related to predictions based on most favorable thermodynamics and ostensibly only stability or properties that are linked to stability can be effectively addressed with this technology. The method has been successfully used in some therapeutic proteins, especially in engineering immunoglobulins. In silico predictions avoid testing extraordinarily large numbers of potential variants. Predictions based on existing three-dimensional structures are more likely to succeed than predictions based on hypothetical structures. This technology can readily predict and allow targeted screening of multiple simultaneous mutations, something not possible with purely experimental technologies due to exponential increases in numbers.

[0451] Iterative Saturation Mutagenesis (ISM) involves: (1) use knowledge of structure/function to choose a likely site for enzyme improvement, (2) saturation mutagenesis at the chosen site using Agilent QuickChange (or other suitable means), (3) screen/select for desired properties, (4) with improved clone(s), start over at another site and continue repeating. (Reetz, M. T. and J. D. Carballeira, 2007, Iterative saturation mutagenesis (ISM) for rapid directed evolution of functional enzymes. Nat. Protoc. 2:891-903; and Reetz, M. T., J. D. Carballeira, and A. Vogel, 2006, Iterative saturation mutagenesis on the basis of B factors as a strategy for increasing protein thermos stability. Angew. Chem. Int. Ed Engl. 45:7745-7751.) This is a proven methodology assures all possible replacements at a given position are made for screening/selection.

[0452] Any of the aforementioned methods for mutagenesis can be used alone or in any combination. Additionally, any one or combination of the directed evolution methods can be used in conjunction with adaptive evolution techniques.

[0453] Additional diversification of a lasso peptide library can be achieved via chemical or enzymatic modifications. In specific embodiments, the lasso peptide component is further modified chemically or enzymatically. Particularly, in some embodiments, enzyme modifications of the lasso peptide component comprises modification by halogenation, lipidation, pegylation, glycosylation, adding hydrophobic groups, myristoylation, palmitoylation, isoprenylation, prenylation, lipoylation, adding a flavin moiety (optionally comprising addition of a flavin adenine dinucleotide (FAD) an FADH₂, a flavin mononucleotide (FMN), an FMNH₂), phospho-pantetheinylation, heme C addition, phosphorylation, acylation, alkylation, butyrylation, carboxylation, malonylation, hydroxylation, adding a halide group, iodination, propionylation, S-glutathionylation, succinylation, glycation, adenylation, thiolation, condensation. Particularly, in some embodiments condensation comprises addition of an amino acid to an amino acid, an amino acid to a fatty acid, or an amino acid to a sugar. In some embodiments, enzymatic modification of the lasso peptide component comprises a combination of one or more aforementioned modifications. For example, in some embodiments, enzyme modification comprises modification of the lasso peptide component by one or more enzymes selected from a CoA ligase, a phosphorylase, a kinase, a glycosyl-transferase, a halogenase, a methyltransferase, a hydroxylase, a lambda phage GamS enzyme (optionally used with a bacterial or an E. coli extract, optionally at a concentration of about 3.5 mM), a Dsb (disulfide bond) family enzyme (optionally DsbA), or a combination thereof. In some embodiments, the enzymes comprise one or more central metabolism enzyme (e.g., tricarboxylic acid cycle (TCA, or Krebs cycle) enzymes, glycolysis enzymes or Pentose Phosphate Pathway enzymes). In some embodiments, chemical or enzyme modifications to the lasso peptide component comprise addition, deletion or replacement of a substituent or functional groups, e.g., a hydroxyl group, an amino group, a halogen, an alkyl or a cycloalkyl group, or by hydration, biotinylation, hydrogenation, an aldol condensation reaction, condensation polymerization, halogenation, oxidation, dehydrogenation, or creating one or more double bonds.

[0454] In some embodiments, the diversified species of lasso peptides are screened for one or more desirable target properties, and one or more lasso peptides are further selected to serve as the new scaffold for at least one additional round of mutagenesis and screening.

[0455] 5.3.6.3 Phage Production by Host Organisms

[0456] As described herein, the nucleic acids and systems of nucleic acids for producing one or more lasso-displaying phage as described herein (e.g., in above sections titled ‘Nucleic Acid’ and ‘System for Producing Phage Display Libraries’) can be introduced into a suitable host cell, which host cell can then be cultured under a suitable condition to produce the phages. In some embodiments, the host organism can be used to produce either a population of phages displaying the same lasso peptide component, or a library comprising a plurality of phages displaying diversified lasso peptide components. Particularly, to produce the phage display library, one or more nucleic acid sequences encoding the displayed lasso peptide components can be diversified as described herein (e.g., in above section titled ‘Diversifying Lasso Peptides’) before introducing into the host organism. Further, a nucleic acid sequence encoding a displayed lasso peptide component can be introduced into the host organism in combination with different nucleic acid sequences encoding the lasso peptide biosynthesis component to further diversify the library as described herein (e.g., in above section titled ‘Diversifying Lasso Peptides’).

[0457] In some embodiments, the host organisms for producing the lasso-displaying phages is a bacteria. In some embodiments, the host organism for producing the lasso-displaying phages is an archaea. In some embodiments, the host is a bacteria susceptible to phage infection. In some embodiments, the host is a Gram-negative bacteria. In some embodiments, the host is a Gram-positive bacteria. In some embodiments, the host is an archaea susceptible to phage infection. In some embodiments, the host is susceptible to infection by a budding phage. In some embodiments, the host is susceptible to infection by a lytic phage. In some embodiments, the host is E. coli.

[0458] In some embodiments, the host microorganism is genetically engineered to express a protein that contain at least one non-natural or unusual amino acid residues. For example, Wals et al. “Unnatural amino acid incorporation in E. coli: current and future applications in the design of therapeutic proteins” Front Chem. 2014 Apr. 1; 2:15 describes genetically modified E. coli expression systems capable of incorporating unnatural or unusual amino acid residues into protein products.

[0459] In some embodiments, the such expression system uses amber codon suppression. This technology allows the incorporation of a single UAA at a specific site in a protein using a tRNA that recognizes an amber codon (TAG in DNA, UAG in mRNA, and CUA in tRNA). Amber codon suppression involves the following components: mRNA containing the amber codon at the position to incorporate a UAA, modified aminoacyl-tRNA synthetase (aaRS) that is capable of recognizing the UAA, and complementary tRNA (amber tRNA^{CUA}) that can be aminoacylated by the modified aaRS. To incorporate a UAA, the modified aaRS is orthogonal to the tRNA^{CUA} loading machinery of the expression host to allow loading of the UAA onto the tRNA^{CUA}. The tRNA^{CUA} then recognizes the amber codon in the mRNA, resulting in protein with incorporated UAA at a specific site.

[0460] Another exemplary host expression system that is genetically modified for incorporating UAAs into protein products uses four-base codon suppression. Four-base codon can encode multiple distinct UAA into protein and requires aaRS and tRNA pairs that can decode the four-base codons. For example, Hohsaka et al. used four-base codons, such as AGGU and CGGG, together in a single transcript and inserted two different UAAs into the same protein site-specifically (Hohsaka et al., J. Am. Chem. Soc., 1999, 121, 12194-12195).

[0461] It is also possible to combine UAA incorporation with library-based screening procedures of protein or polypeptides for a desirable target property (Wals et al. Supra.). Specifically, screening can possibly be carried out by combination of three libraries in the host, such as E coli, namely an aaRS mutant and tRNA mutant library, a protein or peptide mutant library, and a UAA library. For example, the three libraries described above can be co-transformed into E. coli to produce mutant proteins or polypeptides and to select or screen them for a desirable target property using proper screening procedures.

[0462] In some embodiments, the genetically engineered E. coli cell comprises a nucleic acid sequence encoding a modified aminoacyl-tRNA synthetase (aaRS) capable of recognizing an unusual or unnatural amino acid. In some embodiments, the nucleic acid sequence further encode a complementary tRNA that can be aminoacylated by the modified aaRS. In some embodiments, the genetically engineered E. coli cell comprises a complementary tRNA (e.g., amber tRNA^{CUA}) that can be aminoacylated by the modified aaRS. In some embodiments, the complementary tRNA can be selected from an amber tRNA^{CUA} and a tRNA decodes a four-base codon. In some embodiments, the genetically engineered host cell comprises a mRNA that contains the amber codon UAG. In some embodiments, the genetically engineered host cell comprises a mRNA that contains a four-base codon. In some embodiments, the host microorganism is cultured in a medium comprising at least one unnatural or unusual amino acid. In some embodiments, the UAA incorporation and screen of a phage display lasso peptide library can be carried out at the same time. In some embodiments, the UAA incorporation uses amber codon suppression and/or four-base codon suppression. In some embodiment, a phage display lasso peptide library, an aaRS and tRNA library, and a UAA library can be co-transformed into a host to produce and screen mutant lasso peptides having incorporated UAAs and a desirable target property.

[0463] In some embodiments, the UAA incorporated in the produced protein product can be utilized to introduce post-translational modifications, such as lysine methylation (Nguyen et al. J. Am. Chem. Soc., 2009, 131, 14194-14195), acetylation (Neumann et al., Mol. Cell, 2009, 36, 153-163), and ubiquitination (Virdee et al., Nat. Chem. Biol., 2010, 6, 750-757).

[0464] In some embodiments, the host microorganism is genetically engineered to introduce one or more non-natural post-translational modifications to an expressed protein product, such as glycosylation, lysine methylation (Nguyen et al. J. Am. Chem. Soc., 2009, 131, 14194-14195), acetylation (Neumann et al., Mol. Cell, 2009, 36, 153-163), and ubiquitination (Virdee et al., Nat. Chem. Biol., 2010, 6, 750-757). For example, E coli. strains that are developed by transplanting and adapting the N-glycosylation system found in Campylobacter jejuni can be used to introduce glycosylation to an expressed protein product (Wacker et al., Science, 2002, 298, 1790-1793). Eukaryotic host Pichia pastoris can be modified to produce antibodies with specific human N-glycan structure (Li et al., Nat. Biotechnol., 2006, 24, 210-215). Furthermore, to obtain correct disulfide formation in the production of proinsulin, a therapeutic protein that containing 3 disulfide bridges, Rudolph et al. used a fusion of pro-insulin to the periplasmic E. coli protein disulfide oxidoreductase (DsbA). In some embodiments, the host microorganism is genetically engineered to introduce one or more non-natural post-translational modifications to lasso peptides produced. The post-translational modifications include, but are not limited to, glycosylation, lysine methylation, acetylation, and ubiquitination.

[0465] Metabolic modeling and simulation algorithms can be utilized. Modeling can also be used to design gene knockouts that additionally optimize utilization of the lasso peptide pathway (see, for example, U.S. patent publications US 2002/0012939, US 2003/0224363, US 2004/0029149, US 2004/0072723, US 2003/0059792, US 2002/0168654 and US 2004/0009466, and U.S. Pat. No. 7,127,379). Modeling analysis allows reliable predictions of the effects on shifting the primary metabolism towards more efficient production of exogenously encoded lasso peptide component, lasso peptide biosynthesis component, and phage proteins by the host cells.

[0466] One computational method for identifying and designing metabolic alterations favoring biosynthesis of a desired product is the OptKnock computational framework (Burgard et al., Biotechnol. Bioeng., 2003, 84, 647-657). OptKnock is a metabolic modeling and simulation program that suggests gene deletion or disruption strategies that result in genetically stable metabolic network which overproduces the target product. Specifically, the framework examines the complete metabolic and/or biochemical network in order to suggest genetic manipulations that lead to maximum production of a lasso peptide or related molecules thereof. Such genetic manipulations can be performed on strains used to produce cell lines optimized for the exogenously encoded proteins described herein. Also, this computational methodology can be used to either identify alternative pathways that lead to biosynthesis of a desired lasso peptide or used in connection with non-naturally occurring systems for further optimization of biosynthesis of a lasso peptide.

[0467] Briefly, OptKnock is a term used herein to refer to a computational method and system for modeling cellular metabolism. The OptKnock program relates to a framework of models and methods that incorporate particular constraints into flux balance analysis (FBA) models. These constraints include, for example, qualitative kinetic information, qualitative regulatory information, and/or DNA microarray experimental data. OptKnock also computes solutions to various metabolic problems by, for example, tightening the flux boundaries derived through flux balance models and subsequently probing the performance limits of metabolic networks in the presence of gene additions or deletions. OptKnock computational framework allows the construction of model formulations that allow an effective query of the performance limits of metabolic networks and provides methods for solving the resulting mixed-integer linear programming problems. The metabolic modeling and simulation methods referred to herein as OptKnock are described in, for example, U.S. publication 2002/0168654, filed Jan. 10, 2002, in International Patent No. PCT/US02/00660, filed Jan. 10, 2002, and U.S. publication 2009/0047719, filed Aug. 10, 2007.

[0468] Another computational method for identifying and designing metabolic alterations favoring biosynthetic production of a product is a metabolic modeling and simulation system termed SimPheny®. This computational method and system is described in, for example, U.S. publication 2003/0233218, filed Jun. 14, 2002, and in International Patent Application No. PCT/US03/18838, filed Jun. 13, 2003. SimPheny® is a computational system that can be used to produce a network model in silico and to simulate the flux of mass, energy or charge through the chemical reactions of a biological system to define a solution space that contains any and all possible functionalities of the chemical reactions in the system, thereby determining a range of allowed activities for the biological system. This approach is referred to as constraints-based modeling because the solution space is defined by constraints such as the known stoichiometry of the included reactions as well as reaction thermodynamic and capacity constraints associated with maximum fluxes through reactions. The space defined by these constraints can be interrogated to determine the phenotypic capabilities and behavior of the biological system or of its biochemical components.

[0469] These computational approaches are consistent with biological realities because biological systems are flexible and can reach the same result in different ways. Biological systems are designed through evolutionary mechanisms that have been restricted by fundamental constraints that all living systems must face. Therefore, constraints-based modeling strategy embraces these general realities. Further, the ability to continuously impose further restrictions on a network model via the tightening of constraints results in a reduction in the size of the solution space, thereby enhancing the precision with which biosynthetic performance can be predicted.

[0470] Given the teachings and guidance provided herein, those skilled in the art will be able to apply various computational frameworks for metabolic modeling and simulation to design and implement biosynthesis of exogenously encoded protein components in the host cell. Such metabolic modeling and simulation methods include, for example, the computational systems exemplified above as SimPheny® and OptKnock. Those skilled in the art will know how to apply the identification, design and implementation of the metabolic alterations using OptKnock to any of such other metabolic modeling and simulation computational frameworks and methods well known in the art.

[0471] Methods for constructing and testing the levels expression of exogenously encoded proteins and production of lasso-presenting phages by the host microorganism can be performed, for example, by recombinant and detection methods well known in the art. Such methods can be found described in, for example, Sambrook et al., Molecular Cloning: A Laboratory Manual, Third Ed., Cold Spring Harbor Laboratory, New York (2001); and Ausubel et al., Current Protocols in Molecular Biology, John Wiley and Sons, Baltimore, Md. (1999).

Exogenous nucleic acid sequences encoding the phage component, lasso peptide component or lasso peptide biosynthesis component as described herein can be introduced stably or transiently into a host cell using techniques well known in the art including, but not limited to, conjugation, electroporation, chemical transformation, transduction, transfection, and ultrasound transformation. One or more exogenous nucleic acid sequences can be included in the genome of an infectious phage, and introduced into the host cell through infection of the host cell by the phage.

[0472] For exogenous expression in E. coli or other prokaryotic cells, some nucleic acid sequences in the genes or cDNAs of eukaryotic nucleic acids can encode targeting signals such as an N-terminal mitochondria) or other targeting signal, which can be removed before transformation into prokaryotic host cells, if desired. For example, removal of a mitochondria) leader sequence led to increased expression in E. coli (Hofliueister et al., J. Biol. Chem. 280:4329-4338 (2005)). Genes can be expressed in the cytosol without the addition of leader sequence, or can be targeted to an organelle, or periplasmic space, or targeted for secretion, by the addition of a suitable targeting sequence such as a periplasmic targeting or secretion signal suitable for the host cells. Thus, it is understood that appropriate modifications to a nucleic acid sequence to remove or include a targeting sequence can be incorporated into an exogenous nucleic acid sequence to impart desirable properties. Furthermore, genes can be subjected to codon optimization with techniques well known in the art to achieve optimized expression of the proteins.

[0473] An expression vector or vectors can be constructed to include one or more encoding nucleic acid sequences as exemplified herein operably linked to expression control sequences functional in the host organism. Expression vectors applicable for use in the microbial host organisms of the invention include, for example, plasmids, phage vectors (e.g. phagemid), viral vectors, episomes and artificial chromosomes, including vectors and selection sequences or markers operable for stable integration into a host chromosome. Particularly, a particularly embodiment of an expression vector is a phagemid, comprising both a replication origin for duplicating the double-stranded sequence in the host microorganism, and a phage replication origin for duplicating the single-stranded sequence and packaging the single-stranded sequence into a phage capsid.

[0474] Additionally, the expression vectors can include one or more selectable marker genes and appropriate expression control sequences. Selectable marker genes also can be included that, for example, provide resistance to antibiotics or toxins, complement auxotrophic deficiencies, or supply critical nutrients not in the culture media. Expression control sequences can include constitutive and inducible promoters, transcription enhancers, transcription terminators, and the like which are well known in the art. When two or more exogenous encoding nucleic acids are to be co-expressed, both nucleic acids can be inserted, for example, into a single expression vector or in separate expression vectors. For single vector expression, the encoding nucleic acids can be operationally linked to one common expression control sequence or linked to different expression control sequences, such as one inducible promoter and one constitutive promoter. The transformation of exogenous nucleic acid sequences encoding the phage component, lasso peptide component or lasso peptide biosynthesis component can be confirmed using methods well known in the art. Such methods include, for example, nucleic acid analysis such as Northern blots or polymerise chain reaction (PCR) amplification of mRNA, or immunoblotting for expression of gene products, or other suitable analytical methods to test the expression of an introduced nucleic acid sequence or its corresponding gene product. It is understood by those skilled in the art that the exogenous nucleic acid is expressed in a sufficient amount to produce the desired product, and it is further understood that expression levels can be optimized to obtain sufficient expression using methods well known in the art and as disclosed herein.

[0475] Suitable purification and/or assays to test for the production of the encoded proteins can be performed using well known methods. The individual enzyme or protein activities from the exogenous nucleic acid sequences can also be assayed using methods well known in the art (see, for example, WO/2008/115840 and Hanai et al., Appl. Environ. Microbiol. 73:7814-7818 (2007)).

[0476] The host microorganisms can be cultured in a medium with carbon source and other essential nutrients to grow and produce lasso-displaying phages. For certain host organisms, culturing can be maintained under anaerobic conditions. Such conditions can be obtained, for example, by first spying the medium with nitrogen and then sealing the flasks with a septum and crimp-cap. For host organisms where growth is not observed anaerobically, microaerobic conditions can be applied by perforating the septum with a small hole for limited aeration. Exemplary anaerobic conditions have been described previously and are well-known in the art. Exemplary aerobic and anaerobic conditions are described, for example, in United States Publication No. US-2009-0047719, filed Aug. 10, 2007.

If desired, the pH of the medium can be maintained at a desired pH, in particular neutral pH, such as a pH of around 7 by addition of a base, such as NaOH or other bases, or acid, as needed to maintain the culture medium at a desirable pH. The growth rate can be determined by measuring optical density using a spectrophotometer (600 nm), and the glucose uptake rate by monitoring carbon source depletion over time.

[0477] Host organisms of the present invention can utilize, for example, any carbohydrate source which can supply a source of carbon to the non-naturally occurring microorganism. Such sources include, for example, sugars such as glucose, xylose, arabinose, galactose, mannose, fructose and starch. Other sources of carbohydrate include, for example, renewable feedstocks and biomass. Exemplary types of biomasses that can be used as feedstocks in the methods of the invention include cellulosic biomass, hemicellulosic biomass and lignin feedstocks or portions of feedstocks. Such biomass feedstocks contain, for example, carbohydrate substrates useful as carbon sources such as glucose, xylose, arabinose, galactose, mannose, fructose and starch. Given the teachings and guidance provided herein, those skilled in the art will understand that renewable feedstocks and biomass other than those exemplified above also can be used for culturing the microbial organisms of the invention.

[0478] Suitable purification and/or assays to test the production of phages can be performed using well known methods. For example, the phages can be separated from host cells or cell debris by centrifugation at a suitable speed. The phages can be harvested from supernatants while the host cell components are pelleted and discarded. The harvested phages can be subjected to one or more rounds of washing using a suitable buffer. Yield of the phage can be determined by UV absorbance as described by Day and Wiseman (The Single-Stranded DNA Phages, Cold Spring Harbor, N.Y., 1978, p 605): phage concentration (phages/mL)=((A₂₆₉−A₃₂₀)×6×10¹⁶)/(phage genome size in nt)×dilution factor, or the plaque assay, for lytic phages, as described by Jiang et al., Infect Immun. 1997, 65(11):4770-7.

[0479] Display of the lasso peptide component on the phage can be detected using methods known in the art. For example, a specific peptidase can be added to the harvested phage to cleave the peptidic linker between the lasso peptide component and the phage coat protein. The protease digestion reaction mixture is then centrifuged to precipitate insoluble debris. The soluble faction which contains released lasso peptide component can be then subjected to analysis using methods known in the art. For example, suitable replicates such as triplicate of the soluble faction, can be collected and analyzed to verify lasso peptide production and concentrations. The final concentrations of lasso peptide components can be analyzed by methods such as HPLC (High Performance Liquid Chromatography), GC-MS (Gas Chromatography-Mass Spectrometry), LC-MS (Liquid Chromatography-Mass Spectrometry), MALDI or other suitable analytical methods using routine procedures well known in the art. The presence of the phage nucleic acid sequences encoding the lasso peptide component in the pelleted phage-containing faction can be independently detected by PCR amplification and nucleic acid sequencing.

[0480] Lasso peptide components released from the phage can be isolated, separated purified using a variety of methods well known in the art. Such separation methods include, for example, extraction procedures, including using organic solvents such as methanol, butanol, ethyl acetate, and the like, as well as methods that include continuous liquid-liquid extraction, solid-liquid extraction, solid phase extraction, pervaporation, membrane filtration, membrane separation, reverse osmosis, electrodialysis, dialysis, distillation, crystallization, centrifugation, extractive filtration, ion exchange chromatography, size exclusion chromatography, adsorption chromatography, ultrafiltration, medium pressure liquid chromatograpy (MPLC), and high pressure liquid chromatography (HPLC). Additional separation and analytical methods suitable for recombinant proteins, such as affinity chromatography and ELISA can be used. All of the above methods are well known in the art and can be implemented in either analytical or preparative modes.

[0481] In some embodiments, a harvested phage population displaying the same lasso peptide component are placed in a separate location on a solid support, to be distinguished from another phage population displaying a different lasso peptide component. In other embodiments, a phage population displaying diversified lasso peptide components are mixed together in a library.

### 5.4 Screening and Evolution

[0482] The lasso peptides and functional fragments of lasso peptides provided herein can find uses in various aspects, including but are not limited to, diagnostic uses, prognostic uses, therapeutic uses, or as nutraceuticals or food supplements, for humans and animals. In some embodiments, the phage display libraries provided herein can be screened for members having one or more desirable properties, for example, by subjecting the library to various biological assays. In some embodiments, the library can be screened using assays known in the art.

[0483] According to the present disclosure, phage display library can be used in directed evolution of candidate lasso peptides for the generation of improved lasso peptides having those target properties. In some embodiments, the phage display library used in evolution can be produced using the methods described herein or any other methods.

[0484] Characteristics of lasso peptides that can be target properties include, for example, binding selectivity or specificity—for target-specific effects and avoiding off-target side effects or toxicity; binding affinity—for target-modulating potency and duration; temperature stability—for robust high temperature processing; pH stability—for bioprocessing under lower or higher pH conditions; expression level—increased protein yields. Other desirable target properties include, for example, solubility, metabolic stability, bioavailability, and pharmacokinetics. The present methods thus enable the discovery and optimization of lasso peptides and related molecules thereof for use in pharmaceutical, agricultural, and consumer applications.

[0485] Evolution of lasso peptide of interest using phage display library can be accomplished by various techniques known in the art. For example, a target molecule (e.g., a glucagon receptor (GCGR) polypeptide or fragment) can be used to coat the wells of adsorption plates, expressed on host cells affixed to adsorption plates or used in cell sorting, conjugated to biotin for capture with streptavidin-coated beads, or used in any other method for panning display libraries. The selection of lasso peptides with slow dissociation kinetics (e.g., good binding affinities) can be promoted by use of long washes and stringent panning conditions as described in Bass et al., 1990, Proteins 8:309-14 and WO 92/09690, and by use of a low coating density of target molecules as described in Marks et al., 1992, Biotechnol. 10:779-83.

[0486] Lasso peptides having one or more desirable target property(ies) can be obtained by designing a suitable screening procedure to select for one or more candidate members from the phage-displayed lasso peptide library as scaffold(s), followed by evolving the scaffolds towards improved target property.

[0487] 5.4.1 Screening Lasso Peptides for Desirable Target Properties Using a Phage Display Library

[0488] Provided herein are phage display libraries that comprise lasso peptide components. In various embodiments, the lasso peptide component can assume the form of (i) an intact lasso peptide, (ii) a functional fragment of a lasso peptide, (iii) a lasso precursor peptide, or (iv) a lasso core peptide. In particular embodiments, the phage displayed lasso peptide component is lasso peptides having the lariat-like topology. In particular embodiments, the phage displayed lasso peptide component is a function fragment of a lasso peptide as described herein. In some embodiments, neither the non-lasso component of the coat protein nor other components of the phage interferes with either the functional or structural feature of the lasso peptide component.

[0489] A phage display library that comprises lasso peptide components can be screened for one or more target properties. In some embodiments, the phage display library is screened for library member(s) that shows affinity to a target molecule. In some embodiments, the phage display library is screened for library member(s) that specifically binds to a target molecule. In some embodiments, the phage display library is screened for library member(s) that specifically binds to a target site within a target molecule that has multiple sites capable of being bound by a ligand. In some embodiments, the phage display library is screened for library member(s) that compete for binding with a known ligand to a target molecule. In specific embodiments, such known ligand can also be a lasso peptide. In other embodiments, such known molecule can be a non-lasso ligand of the target molecule, such as a drug compound or a non-lasso protein. Various binding assays have been developed for testing the binding activity of members of a lasso peptide display library to a target molecule.

[0490] In one aspect, provided herein are methods for identifying a lasso peptide that specifically binds to a target molecule. In some embodiment, the method comprises providing a phage display library comprising a plurality of members, each member comprising a lasso peptide or a functional fragment of lasso peptide; contacting the library with the target molecule under a suitable condition that allows at least one member of the library to form a complex with the target molecule; and identifying the member of in the complex. In some embodiment, the contacting is performed by contacting the library with the target molecule in the presence of a reference binding partner of the target molecule under a suitable condition that allows at least one member of the library to compete with the reference binding partner for binding to the target molecule. In some embodiment, the identifying step is performed by detecting reduced binding of the reference binding partner to the target molecule; and identifying the member responsible for the reduced binding. In some embodiments, the reference binding partner is a ligand for the target molecule. In some embodiments, the target molecule comprises one or more target sites, and the reference binding partner specifically binds to a target site of the target molecule. In some embodiments, the reference binding partner is a natural ligand or synthetic ligand for the target molecule. In some embodiments, the target molecule is at least two target molecules.

[0491] Various binding assays can be used in connection with the present disclosure include immunoassays (e.g., ELISA, fluorescent immunosorbent assay, chemiluminescence immune assay, radioimmunoassay (RIA), enzyme multiplied immunoassay, solid phase radioimmunoassay (SPRIA)), a surface plasmon resonance (SPR) assay (e.g., Biacore®), a fluorescence polarization assay, a fluorescent resonance energy transfer (FRET) assay, Dot-blot assay, fluorescence activated cell sorting (FACS) assay. Depending on the target cellular activity of interest, those of ordinary skill in the art knows how to select a suitable binding assay for the screening.

[0492] In some embodiments, to identify a lasso peptide that modulates a cellular activity, a phage display library comprising lasso peptide components is screened for library members(s) that is capable of modulating one or more cellular activities. In some embodiments, a phage display library is subjected to a suitable biological assay that monitors the level of a cellular activity of interest. When a change in the level of the cellular activity of interest is detected, the member responsible for the detected change can be identified. In some embodiments, the library is subject to multiple biological assays configured for measuring the cellular activity; and the method further comprises selecting the members that have a high probability of being identified as responsible for the detected change in the cellular activity.

[0493] In some embodiments, the target molecule is a cell surface protein. In some embodiments, the phage display library comprising lasso peptide components is screened for library members(s) that is capable of modulating one or more cellular activities mediated by the cell surface protein. In some embodiments, a phage display library is subjected to a suitable biological assay that monitors the level of a cellular activity of interest, after the library is contacted with a cell expressing the target molecule. In some embodiments, a phage display library is subjected to a suitable biological assay that monitors a phenotype of interest of a cell after the library is contacted with a cell expressing the target molecule. In some embodiments, the target molecule is an unidentified cell surface protein expressed by a cell of interest. In some embodiments, a phage display library is subjected to a biological assay that monitors the level of a cellular activity of interest, after the library is contacted with a population of the cells of interest. In some embodiments, library member(s) that causes and/or enhances a cellular activity and/or cell phenotype of interest is selected. In other embodiments, library member(s) of that reduces and/or prevents a cellular activity and/or cell phenotype of interest is selected. Additionally or alternatively, in some embodiments, a phage display library is subjected to a biological assay that monitors a phenotype of the cell of interest, after the library is contacted with the cell.

[0494] In some embodiments, a phage display library is subjected to biological assays that monitor multiple related cellular activities. For example, in some embodiments, each of the multiple related cellular activities induces or inhibits the same cellular signaling pathway. In some embodiments, the multiple related cellular activities are implicated in the same pathological process. In some embodiments, the multiple related cellular activities are implicated in regulating the cell cycle. In some embodiments, each of the multiple related cellular activities induces or inhibits cell proliferation. In some embodiments, each of the multiple related cellular activities induces or inhibits cell differentiation. In some embodiments, each of the multiple related cellular activities induces or inhibits cell apoptosis. In some embodiments, each of the multiple related cellular activities induces or inhibits cell migration.

[0495] In some embodiments, to identify an agonist or antagonist lasso peptide for a target molecule, a phage display library comprising lasso peptide components is screened for library members(s) that is capable of binding to the target molecule. In some embodiments, a phage display library is contacted with a cell expressing the target molecule under a suitable condition that allows at least one member of the library to bind to the target molecule, and a cellular activity mediated by the target molecule is measured. In some embodiments, the cellular activity can be increased, and the member can be identified as an agonist ligand for the target molecule. In other embodiments, the cellular activity can be decreased, and the member can be identified as an antagonist ligand for the target molecule.

[0496] In some embodiments, library member(s) identified as responsible for a detected change in at least one monitored cellular activity is selected. In some embodiments, library member(s) identified as responsible for a detected change in at least two monitored cellular activities is selected. In some embodiments, library member(s) identified as responsible for a detected change in at least three monitored cellular activities is selected. In some embodiments, library member(s) identified as responsible for a detected change in at least 10% monitored cellular activities is selected. In some embodiments, library member(s) identified as responsible for a detected change in at least 20% monitored cellular activities is selected. In some embodiments, library member(s) identified as responsible for a detected change in at least 30% monitored cellular activities is selected. In some embodiments, library member(s) identified as responsible for a detected change in at least 40% monitored cellular activities is selected. In some embodiments, library member(s) identified as responsible for a detected change in at least 50% monitored cellular activities is selected. In some embodiments, library member(s) identified as responsible for a detected change in at least 60% monitored cellular activities is selected. In some embodiments, library member(s) identified as responsible for a detected change in at least 70% monitored cellular activities is selected. In some embodiments, library member(s) identified as responsible for a detected change in at least 80% monitored cellular activities is selected. In some embodiments, library member(s) identified as responsible for a detected change in at least 90% monitored cellular activities is selected.

[0497] In some embodiments, members of a first phage display library selected during a first round of screening for a first desirable property are assembled to into a second phage display library, and the second phage display library has an enriched population of members having the first desirable property. In some embodiments, the second phage display library is further subjected to a second round of screening for a second desirable property, and the selected library members are assembled into a third phage display library. The screening and selection processes can be repeated multiple times to produce one or more final selected member. In various embodiments, the first desirable property is the same as the second desirable property, and/or desirable property(ies) screened for in further round(s) of screens. In alternative embodiments, the first desirable property is different from the second desirable property, and/or desirable property(ies) screened for in further round(s) of screens. In some embodiments, the same desirable property is screened for under different conditions during the first and the second, or further round(s) of screens. For example, in specific embodiments, the desirable property is binding specificity of candidate library members to a target molecule, and during the sequential rounds of screens, the phage display library is subjected to more and more stringent conditions for the library members to bind to the target molecule. For example, in specific embodiments, the first desirable property is a high binding affinity (e g, binding affinity above a certain threshold value) of the candidate library members to a cell surface molecule, and the second desirable property is the ability of the candidate library members to enhance cell apoptosis mediated by the cell surface molecule.

[0498] In some embodiments, any method for screening for a desired enzyme activity, e.g., production of a desired product, e.g., such as a lasso peptide or related molecule thereof, can be used. Any method for isolating enzyme products or final products, e.g., lasso peptides or related molecules thereof, can be used. In alternative embodiments, methods and compositions of the present disclosure comprise use of any method or apparatus to detect a purposefully biosynthesized organic product, e.g., lasso peptide or related molecule thereof, or supplemented or microbially-produced organic products (e.g., amino acids, CoA, ATP, carbon dioxide), by e.g., employing invasive sampling of either cell extract or headspace followed by subjecting the sample to gas chromatography or liquid chromatography often coupled with mass spectrometry.

[0499] 5.4.2 Directed Evolving of Lasso Peptides Using a Phage Display Library

[0500] Provided herein are phage display libraries that comprise lasso peptide components. In various embodiments, the lasso peptide component can assume the form of (i) an intact lasso peptide, (ii) a functional fragment of a lasso peptide, (iii) a lasso precursor peptide, or (iv) a lasso core peptide. In particular embodiments, the phage displayed lasso peptide component is lasso peptides having the lariat-like topology. In particular embodiments, the phage displayed lasso peptide component is a function fragment of a lasso peptide as described herein. In some embodiments, neither the non-lasso component of the coat protein nor other components of the phage interferes with either the functional or structural feature of the lasso peptide component.

[0501] Directed evolution is a powerful approach that involves the introduction of mutations targeted to a specific gene or an oligonucleotide sequence containing a gene in order to improve and/or alter the properties or production of an enzyme, protein or peptide (e.g., a lasso peptide). Improved and/or altered enzymes, proteins or peptides can be identified through the development and implementation of sensitive high-throughput assays that allow automated screening of many enzyme or peptide variants (for example, >10⁴). Iterative rounds of mutagenesis and screening typically are performed to afford an enzyme or peptide with optimized properties.

[0502] Computational algorithms that can help to identify areas of the gene for mutagenesis also have been developed and can significantly reduce the number of enzyme or peptide variants that need to be generated and screened (See: Fox, R J., et al., Trends Biotechnol., 2008, 26, 132-138; Fox, R J., et al., Nature Biotechnol., 2007, 25, 338-344). Numerous directed evolution technologies have been developed and shown to be effective at creating diverse variant libraries, and these methods have been successfully applied to the improvement of a wide range of properties across many enzyme and protein classes (for reviews, see: Hibbert et al., Biomol. Eng., 2005, 22, 11-19; Huisman and Lalonde, In Biocatalysis in the pharmaceutical and biotechnology industries, pgs. 717-742 (2007), Patel (ed.), CRC Press; Otten and Quax, Biomol. Eng., 2005, 22, 1-9; and Sen et al., Appl. Biochem. Biotechnol., 2007, 143, 212-223). Enzyme and protein characteristics that have been improved and/or altered by directed evolution technologies include, for example: selectivity/specificity, for conversion of non-natural substrates, temperature stability, for robust high temperature processing; pH stability, for bioprocessing under lower or higher pH conditions; substrate or product tolerance, so that high product titers can be achieved; binding (Kₘ), including broadening of ligand or substrate binding to include non-natural substrates, inhibition (Kᵢ), to remove inhibition by products, substrates, or key intermediates; activity (kₘ), to increase enzymatic reaction rates to achieve desired flux; isoelectric point (p1) to improve protein or peptide solubility; acid dissociation (pKₐ) to vary the ionization state of the protein or peptide with respect to pH; expression levels, to increase protein or peptide yields and overall pathway flux; oxygen stability, for operation of air-sensitive enzymes or peptides under aerobic conditions; and anaerobic activity, for operation of an aerobic enzyme or peptide in the absence of oxygen.

[0503] In one embodiment, a lasso peptide of interest is selected as the initial scaffold for directed evolution. Random mutations are introduced to a nucleic acid sequence encoding the initial scaffold, thereby producing a plurality of different mutated versions of the coding nucleic acid sequence. In some embodiments, a coding sequence of lasso precursor or lasso core peptide is mutated using the methods described herein or known in the art to produce a plurality of mutated versions of the coding sequence. Particularly, in some embodiments, the initial scaffold sequence is mutated by replacing one codon with a randomized codon (e.g., NNN) or a degenerated codon (e.g., NNK). In some embodiments such as those exemplified in Example 6, a plurality of initial scaffold sequences are individually mutated such that each mutated sequence has one codon replaced with a randomized or degenerated codon, and the replaced codons in the plurality of mutated sequences are each different from one another. In some embodiments such as those exemplified in Example 7, the initial scaffold sequence encoding a lasso core peptide is mutated by replacing all codons except the one coding for the ring-forming amino acid with a randomized or degenerated codon. In particular embodiments, the non-mutated codon encodes a glutamate residue (Glu) at the 7^{th}, 8^{th} or 9^{th} position counting from the N terminus of the encoded lasso core peptide. In particular embodiments, the non-mutated codon encodes an aspartate residue (Asp) at the 7^{th}, 8^{th} or 9^{th} position counting from the N terminus of the encoded lasso core peptide.

[0504] The plurality of mutated versions of the coding sequence are then used to produce a first phage display library comprising a plurality of members displaying distinct lasso peptides or functional fragments of lasso peptides using, for example, the methods disclosed herein. The library is then screened for candidate members having a desirable target property. Sequences of library members selected during the screen are analyze to identify beneficial mutations that lead to or improves the target property of the lasso peptides. One or more beneficial mutations are then introduced to the nucleic acid molecule encoding the initial scaffold to produce an improved version of the lasso peptide.

[0505] Optionally, in some embodiments, the coding sequence of the improved version of the lasso peptide is further mutated to introduce one or more additional mutations, while maintain the beneficial mutations, in the coding sequence. In some embodiments, a plurality of mutated versions of the coding sequences, each comprising at least one beneficial mutation identified in the first round of screen and at least one additional mutation is provided. These plurality of mutated versions of the coding sequences are then used to produce a second phage display library using, for example, the methods described herein. As such, the second phage display library is enriched with lasso peptides having at least one beneficial mutations. In some embodiments, the second phage display library is subjected to at least one more round of screening to identify improved members having the desirable target property. In some embodiments, additional beneficial mutations can be identified during the second round of the screening, and these additional beneficial mutations can also be used to design improved versions of the lasso peptide.

[0506] In some embodiments, additional beneficial mutations are also incorporated into members of a third or further phage display library(ies), which library(ies) can be subjected to a third or further round of screening and selection to identify candidate member(s) having the desirable target property. Additional beneficial mutations can be further identified for the evolution of the initial scaffold toward variants having improved target property. Examples 6 and 7 provide detailed exemplary procedures for directed evolution of lasso peptides.

[0507] In some embodiments, a later round of screening is performed at a more stringent condition as compared to an earlier round of screening, such that in the later round of screening, library members exhibiting the target property to a great extent (i.e. a better candidate) can be identified. Various adjustments for obtaining a more stringent screening condition are within the knowledge and skill in the art. For example, in specific embodiments, to identify lasso peptides that specifically binds to a target molecule, a more stringent screening condition can be achieved by performing the screening in the presence of a higher concentration of a molecule known to compete for binding to the target molecule. For example, in specific embodiments, to identify lasso peptides of improved thermal stability, a more stringent screening condition can be achieved by performing the screening at a higher temperature. For example, in specific embodiments, to identify lasso peptides capable of modulating a cellular activity or cell phenotype of interest, a more stringent screening condition can be achieved by performing the screening using less (or at a lower concentration of) candidate lasso peptides. In other embodiments, a more stringent screening condition can be achieved by setting forth a higher threshold for selection (e.g., a lower EC₅₀ or IC₅₀ in an assay measuring modulation of a cellular activity of interest, or a lower CC₅₀ in an assay measuring induced cell death, or a lower K_{d} in a binding assay, etc.).

[0508] Furthermore, a number of exemplary methods have been developed for the mutagenesis and diversification of genes and oligonucleotides to introduce into, and/or improve desirable target properties of, specific enzymes, proteins and peptides. Such methods are well known to those skilled in the art. Any of these can be used to alter and/or optimize the activity of a lasso peptide biosynthetic pathway enzyme, protein, or peptide, including a lasso precursor peptide, a lasso core peptide, or a lasso peptide. Such methods include, but are not limited to error-prone polymerase chain reaction (epPCR), which introduces random point mutations by reducing the fidelity of DNA polymerase in PCR reactions (See: Pritchard et al., J. Theor. Biol., 2005, 234:497-509); Error-prone Rolling Circle Amplification (epRCA), which is similar to epPCR except a whole circular plasmid is used as the template and random 6-mers with exonuclease resistant thiophosphate linkages on the last 2 nucleotides are used to amplify the plasmid followed by transformation into cells in which the plasmid is re-circularized at tandem repeats (Fujii et al., Nucleic Acids Res., 2004, 32:e 145; and Fujii et al., Nat. Protoc., 2006, 1, 2493-2497); DNA, Gene, or Family Shuffling, which typically involves digestion of two or more variant genes with nucleases such as DNase I or EndoV to generate a pool of random fragments that are reassembled by cycles of annealing and extension in the presence of DNA polymerase to create a library of chimeric genes (Stemmer, Proc. Natl. Acad. Sci. U.S.A., 1994, 91, 10747-10751; and Stemmer, Nature, 1994, 370, 389-391); Staggered Extension (StEP), which entails template priming followed by repeated cycles of 2-step PCR with denaturation and very short duration of annealing/extension (as short as 5 sec) (Zhao et al., Nat. Biotechnol., 1998, 16, 258-261); Random Priming Recombination (RPR), in which random sequence primers are used to generate many short DNA fragments complementary to different segments of the template (Shao et al., Nucleic Acids Res., 1998, 26, 681-683).

[0509] Additional methods include Heteroduplex Recombination, in which linearized plasmid DNA is used to form heteroduplexes that are repaired by mismatch repair (See: Volkov et al, Nucleic Acids Res., 1999, 27:e18; Volkov et al., Methods Enzymol., 2000, 328, 456-463); Random Chimeragenesis on Transient Templates (RACHITT), which employs DNase I fragmentation and size fractionation of single-stranded DNA (ssDNA) (See: Coco et al., Nat. Biotechnol., 2001, 19, 354-359); Recombined Extension on Truncated Templates (RE 1′1), which entails template switching of unidirectionally growing strands from primers in the presence of unidirectional ssDNA fragments used as a pool of templates (See: Lee et al., J. Mol. Cat., 2003, 26, 119-129); Degenerate Oligonucleotide Gene Shuffling (DOGS), in which degenerate primers are used to control recombination between molecules; (Bergquist and Gibbs, Methods Mol. Biol., 2007, 352, 191-204; Bergquist et al., Biomol. Eng., 2005, 22, 63-72; Gibbs et al., Gene, 2001, 271, 13-20); Incremental Truncation for the Creation of Hybrid Enzymes (ITCHY), which creates a combinatorial library with 1 base pair deletions of a gene or gene fragment of interest (See: Ostermeier et al., Proc. Natl. Acad. Sci. U.S.A., 1999, 96, 3562-3567; and Ostermeier et al., Nat. Biotechnol., 1999, 17, 1205-1209); Thio-Incremental Truncation for the Creation of Hybrid Enzymes (THIO-ITCHY), which is similar to ITCHY except that phosphothioate dNTPs are used to generate truncations (See: Lutz et al., Nucleic Acids Res., 2001, 29, E16); SCRATCHY, which combines two methods for recombining genes, ITCHY and DNA Shuffling (See: Lutz et al., Proc. Natl. Acad. Sci. U.S.A., 2001, 98, 11248-11253); Random Drift Mutagenesis (RNDM), in which mutations made via epPCR are followed by screening/selection for those retaining usable activity (See: Bergquist et al., Biomol. Eng., 2005, 22, 63-72); Sequence Saturation Mutagenesis (SeSaM), a random mutagenesis method that generates a pool of random length fragments using random incorporation of a phosphothioate nucleotide and cleavage, which is used as a template to extend in the presence of “universal” bases such as inosine, and replication of an inosine-containing complement gives random base incorporation and, consequently, mutagenesis (See: Wong et al., Biotechnol. J., 2008, 3, 74-82; Wong et al., Nucleic Acids Res., 2004, 32, e26; Wong et al., Anal. Biochem., 2005, 341, 187-189); Synthetic Shuffling, which uses overlapping oligonucleotides designed to encode “all genetic diversity in targets” and allows a very high diversity for the shuffled progeny (See: Ness et al., Nat. Biotechnol., 2002, 20, 1251-1255); Nucleotide Exchange and Excision Technology NexT, which exploits a combination of dUTP incorporation followed by treatment with uracil DNA glycosylase and then piperidine to perform endpoint DNA fragmentation (See: Muller et al., Nucleic Acids Res., 33:e117).

[0510] Further methods include Sequence Homology-Independent Protein Recombination (SHIPREC), in which a linker is used to facilitate fusion between two distantly related or unrelated genes, and a range of chimeras is generated between the two genes, resulting in libraries of single-crossover hybrids (See: Sieber et al., Nat. Biotechnol., 2001, 19, 456-460); Gene Site Saturation Mutagenesis™ (GSSM™), in which the starting materials include a supercoiled double stranded DNA (dsDNA) plasmid containing an insert and two primers which are degenerate at the desired site of mutations, enabling all amino acid variations to be introduced individually at each position of a protein or peptide (See: Kretz et al., Methods Enzymol., 2004, 388, 3-11); Combinatorial Cassette Mutagenesis (CCM), which involves the use of short oligonucleotide cassettes to replace limited regions with a large number of possible amino acid sequence alterations (See: Reidhaar-Olson et al. Methods Enzymol., 1991, 208, 564-586; Reidhaar-Olson et al. Science, 1988, 241, 53-57); Combinatorial Multiple Cassette Mutagenesis (CMCM), which is essentially similar to CCM and uses epPCR at high mutation rate to identify hot spots and hot regions and then extension by CMCM to cover a defined region of protein sequence space (See: Reetz et al., Angew. Chem. Int. Ed Engl., 2001, 40, 3589-3591); the Mutator Strains technique, in which conditional is mutator plasmids, utilizing the mutD5 gene, which encodes a mutant subunit of DNA polymerase III, to allow a 20 to 4000-fold increase in random and natural mutation frequency during selection and block accumulation of deleterious mutations when selection is not required (See: Selifonova et al., Appl. Environ. Microbiol., 2001, 67, 3645-3649); Low et al., J. Mol. Biol., 1996, 260, 3659-3680).

[0511] Additional exemplary methods include Look-Through Mutagenesis (LTM), which is a multidimensional mutagenesis method that assesses and optimizes combinatorial mutations of a selected set of amino acids (See: Rajpal et al., Proc. Natl. Acad. Sci. U.S.A., 2005, 102, 8466-8471); Gene Reassembly, which is a homology-independent DNA shuffling method that can be applied to multiple genes at one time or to create a large library of chimeras (multiple mutations) of a single gene (See: Short, J. M., U.S. Pat. No. 5,965,408, Tunable GeneReassembly™); in Silico Protein Design Automation (PDA), which is an optimization algorithm that anchors the structurally defined protein backbone possessing a particular fold, and searches sequence space for amino acid substitutions that can stabilize the fold and overall protein energetics, and generally works most effectively on proteins with known three-dimensional structures (See: Hayes et al., Proc. Natl. Acad. Sci. U.S.A., 2002, 99, 15926-15931); and Iterative Saturation Mutagenesis (ISM), which involves using knowledge of structure/function to choose a likely site for enzyme improvement, performing saturation mutagenesis at chosen site using a mutagenesis method such as Agilent QuikChange Lightning Site-Directed Mutagenesis (Agilent Technologies; Santa Clara Calif.), screening/selecting for desired properties, and, using improved clone(s), starting over at another site and continue repeating until a desired activity is achieved (See: Reetz et al., Nat. Protoc., 2007, 2, 891-903; Reetz et al., Angew. Chem. Int. Fd Engl., 2006, 45, 7745-7751).

[0512] Any of the aforementioned methods for lasso peptide mutagenesis and/or display can be used alone or in any combination to improve the performance of lasso peptide biosynthesis pathway enzymes, proteins, and peptides. Similarly, any of the aforementioned methods for mutagenesis and/or display can be used alone or in any combination to enable the creation of lasso peptide variants which may be selected for improved properties.

[0513] In alternative embodiments, the present disclosure provides a method or composition according to any embodiment of the present disclosure, substantially as herein before described, or described herein, with reference to any one of the examples. In alternative embodiments, practicing the present disclosure comprises use of any conventional technique commonly used in molecular biology, microbiology, and recombinant DNA, which are within the skill of the art. Such techniques are known to those of skill in the art and are described in numerous texts and reference works (See e.g., Green and Sambrook, “Molecular Cloning: A Laboratory Manual,” 4th Edition, Cold Spring Harbor, 2012; and Ausubel et al., “Current Protocols in Molecular Biology,” 1987). Unless defined otherwise herein, all technical and scientific terms used herein have the same meaning as commonly understood by one of ordinary skill in the art to which the present disclosure pertains. For example, Singleton and Sainsbury, Dictionary of Microbiology and Molecular Biology, 2d Ed., John Wiley and Sons, N Y (1994); and Hale and Marham, The Harper Collins Dictionary of Biology, Harper Perennial, NY (1991) provides those of skill in the art with general dictionaries of many of the terms used in the present disclosure. Although any methods and materials similar or equivalent to those described herein find use in the practice of the present disclosure, the preferred methods and materials are described herein. Accordingly, the terms defined below are more fully described by reference to the Specification as a whole.

### 6. EXAMPLES

TABLE A
The list of protein sequences described in the following Examples 1-9.

| SEQ ID | | | Gen Bank |
|---|---|---|---|
| NO: | Name | A.A. sequence | Accession # |
| 2631 | Fusilassin | WYTAEWGLELIFVFPRFI (W1-E9 cyclized) | N/A |
| | (Thermobifida | | |
| | fusca) | | |
| 2632 | Fusilassin precursor | MEKKKYTAPQLAKVGEFKEATGWYTAEWGLELIF | N/A |
| | A (Thermobifida | VFPRFI | |
| | fusca) | | |
| 2633 | Fusilassin peptidase | MSENVVLQRSNVRLSWRTKWAARCAVGAARLLAR | WP_ |
| | B (Thermobifida | KPPERIRATLLRLRGEVRPATYEEAKAARDAVLAVS | 011291590 |
| | fusca) | LRCAGLRACLQRSLAIALLCRMRGTWATWCVGVPR | |
| | | RPPFIGHAWVEAEGRLVEEGVGYDYFSRLITVD | |
| 2634 | Fusilassin cyclase C | MVGCISPYFAVFPDKDVLGQATDRLPAAQTLASHPS | WP_ |
| | (Thermobifida | GRPWLVGALPADQLLLVEAGERRLAVIGHCSAEPE | 011291592 |
| | fusca) | RLRAELAQIDDVAQFDRIARTLDGSFHLVVVVGDQ | |
| | | MRIQGSVSGLRRVFHAHVGTARIAADRSDVLAAVL | |
| | | GVSPDPDVLALRMFNGLPYPLSELPPWPGVEHVPA | |
| | | WHYLSLGLHDGRHRVVQWWHPPEAELAVTAAAPL | |
| | | LRTALAGAVDTRTRGGGVVSADLSGGLDSTPLCAL | |
| | | AARGPAKVVALTFSSGLDTDDDLRWAKIAHQSFPS | |
| | | VEHVVLSPEDIPGFYAGLDGEFPLLDEPSVAMLSTPR | |
| | | ILSRLHrARAHGSRLHMDGLGGDQLLTGSLSLYHDL | |
| | | LWQRPWTALPLIRGHRLLAGLSLSETFASLADRRDL | |
| | | RAWLADIRHSIATGEPPRRSLFGWDVLPKCGPWLTA | |
| | | EARERVLARFDAVLESLEPLAPTRGRHADLAAIRAA | |
| | | GRDLRLLHQLGSSDLPRMESPFLDDRVVEACLQVR | |
| | | HEGRMNPFEFKSLMKTAMASLLPAEFLTRQSKTDG | |
| | | TPLAAEGFTEQRDRIIQIWRESRLAELGLIHPDVLVER | |
| | | VKQPYSFRGPDWGMELTLTVELWLRSRERVLQGAN | |
| | | GGDNRS | |
| 2635 | Fusilassin RRE | METFGAEFRLRPEISVAQTDYGMVLLDGRSGEYWQ | WP_ |
| | (Thermobifida | LNDTAALIVQRLLDGHSPADVAQFLTSEYEVERTDA | 011291591 |
| | fusca) | ERDIAALVTSLKENGMALP | |
| 2636 | BI-32169 | GLPWGCPSDIPGWNTPWAC (G1-D9 cyclized) | N/A |
| | (Streptomyces sp. | | |
| | DSM 14996) | | |
| 2637 | BI-32169 analog | GLPWGCPNDLFFVNTPFAC (G1-D9 cyclized) | N/A |
| | (Kibdelosporangium | | |
| | sp. MJ126-NF4) | | |
| 2638 | BI-32169 analog | MIKDDEIYEVPTLVEVGDFAELTLGLPWGCPNDLFF | N/A |
| | precursor A | VNTPFAC | |
| | (Kibdelosporangium | | |
| | sp. MJ126-NF4) | | |
| 2639 | Hybrid BI-32169 | MIKDDEIYEVPTLVEVGDFAELTLGLPWGCPSDIPG | N/A |
| | precursor A | WNTPWAC | |
| 2640 | BI-32169 analog | MTMPVAAETTVPLPWHRHITARLATGSARVLIRLRP | WP_ |
| | peptidase B | RRLRVVLRMVSRGARPATAAQALSARQAVVSVSV | 042177890 |
| | (Kibdelosporangium | RCAGQGCLQRAVATALLCRLAGDWPDWCTGFRTR | |
| | sp. MJ126-NF4) | PFRAHAWVEAEGGAVGEPGDMPLFHTVISVRHPAR | |
| | | EAR | |
| 2641 | BI-32169 analog | MRDRRWRAGVRPSTADAGTKGKGLLVGGNEFLVF | WP_ |
| | cyclase C | PDCPVALDAPGGRTVPHASGRPWLVGDWSDDDIVV | 083466052 |
| | (Kibdelosporangium | ISAGTRRLAIVGQARVNVHAVERSLEAAGSVRDLD | |
| | sp. MJ126-NF4) | AVVGTIPGNFHLIASIDGRTRVQGTVSTVRQVFTATI | |
| | | VGTTVAASGPGLLAAATGSRVDGDALALRLVPVVP | |
| | | WPLCLRPVWSGVEQVAAGHWL | |
| 2642 | BI-32169 analog | MTIALTPNVTATDSEDGLVLLNESTGRYWTLNGTG | WP_ |
| | RRE | AATLRLLLAGNSPAQTASRLAERYPDAVDRTQRDV | 042177888 |
| | (Kibdelosporangium | VALLAALRNARLVTSS | |
| | sp. MJ126-NF4) | | |
| 2643 | PelB secretion | MKYLLPTAAAGLLLLAAQPAMAV↓ | N/A |
| | sequence (ssPelB) | | |
| 2644 | TorA secretion | MNNNDLFQASRRRFLAQLGGLTVAGMLGPSLLTPR | N/A |
| | sequence (ssTorA) | RATA↓VAQA | |
| 2645 | TEV cleavage site | ENLYFQ↓G | N/A |
| 2646 | Linker 1 | GAAAKGAAAKGAAAKGAAAK | N/A |
| 2647 | Linker 2 | SGGGGSGGGGSGGGGSGGGGSGGGG | N/A |
| 2648 | Truncated M13 | DCAFHSGFNEDPFVCEYQGQSSDLPQPPVNAGGGSG | NP_510891 |
| | phage p3 (205-406) | GGSGGGSEGGGSEGGGSEGGGSEGGGSGGGSGSGD | |
| | | FDYEKMANANKGAMTENADENALQSDAKGKLDS | |
| | | VATDYGAAIDGFIGDVSGLANGNGATGDFAGSNSQ | |
| | | MAQVGDGDNSPLMNNFRQYLPSLPQSVECRPFVFS | |
| | | AGKPYEFSIDCDKINLFRGVFAFLLYVA | |
| 2649 | M13 phage p8 (24- | AEGDDPAKAAFNSLQASATEYIGYAWAMVVVIVG | NP_510890 |
| | 73) | ATIGIKLFKKFTSKAS | |
| 2650 | Hemolysin A | QGNSLAKNVLSGGKGNDKLYGSEGADLLDGGEGN | WP_ |
| | (HlyA) (806-1024) | DLLKGGYGNDIYRYLSGYGHHIIDDEGGKDDKLSL | 001142370 |
| | | ADIDFRDVAFKREGNDLIMYKAEGNVLSIGHKNGIT | |
| | | FKNWFEKESDDLSNHQIEQIFDKDGRVITPDSLKKAF | |
| | | EYQQSNNKVSYVYGHDASTYGSQDNLNPLINEISKII | |
| | | SAAGNFDVKEERSAASLLQLSGNASDFSYGRNSITL | |
| | | TASA | |
| 2651 | Hemolysin B (HlyB) | MMSKCSSHNSLYALILLAQYHNITVNAETIRHQYNT | WP_ |
| | | HTQDFGVTEWLLAAKSIGLKAKYVEKHFSRLSIISLP | 000987091 |
| | | ALIWRDDGKHYILSRITKDSSRYLVYDPEQHQSLTFS | |
| | | RDEFEKLYQGKVILVTSRATVVGELAKFDFSWFIPS | |
| | | VVKYRRILLEVLTVSAFIQFLALITPLFFQVVMDKVL | |
| | | VHRGFSTLNIITIAFIIVILFEVILTGARTYIFSHTT | |
| | | SRIDVELGAKLFRHLLALPVSYFENRRVGETVARVREL | |
| | | EQIRNFLTGQALTSVLDLFFSVIFFCVMWYYSPQLTLV | |
| | | ILLSLPCYVIWSLFISPLLRRRLDDKFLRNAENQAFLV | |
| | | ETVTAINTIKSMAVSPQMIATWDKQLAGYVASSFRV | |
| | | NLVAMTGQQGIQLIQKSVMVISLWMGAHLVISGEISI | |
| | | GQLIAFNMLAGQVIAPVIRLAHLWQDFQQVGISVER | |
| | | LGDVLNTPVEKKSGRNILPE1QGDIEFKNVRFRYSSD | |
| | | GNVILNNINLYISKGDVIGIVGRSGSGKSTLTKLLQRF | |
| | | YIPETGQILIDGHDLSLADPEWLRRQIGVVLQENILL | |
| | | NRSIIDNITLASPAVSMEQAIEAARLAGAHDFIRELKE | |
| | | GYNTIVGEQGVGLSGGQRQRIAIARALVTNPRILIFD | |
| | | EATSALDYESENIIMKNMSRICKNRTVIIIAHRLSTVK | |
| | | NANRIIVMDNGFISEDGTHKELISKKDSLYAYLYQL | |
| | | QA | |
| 2652 | Hemolysin D | MRFYMKGLWDLVCRYKTVFSDVWKIRHTLDAPVREK | WP_ |
| | (HlyD) | DEYAFLPAHLELIETPVSRRSHFVVWSILLFVIISLL | 100028866 |
| | | LSVLGKVEVVSVANGKFTHSGRSKE1KPIENAIVEKI | |
| | | MVKDGSFVKKNDPLVELTVPGVESDILKSEASLLYE | |
| | | KTEQYRYAILSESIQRNELPEIR1TDFPGGEDNAGGE | |
| | | HFQRVSSLIKEQFMTWQNRKNQKQLTLNKKTVERDA | |
| | | ALARVSLYEHQVSQEGRKLNDFKYLLNKKAVSQHS | |
| | | VMEQENSYIQAKNEHAVWLAQVSQLEKEIELVREEL | |
| | | ALETNIFRSE1IEKHRKSTDNIVLLEHELEKNRQRKA | |
| | | SSFIKAPVSGTVQELNIHTEGGVVTTAETLMIIVPDN | |
| | | DILEVTASVLNKDIGFIQPGQEVVIKVDAYPYTRHGY | |
| | | LTGKVKNITADSVSVPDTGLVFNVIISVDRNDIQGER | |
| | | KKIPVTAGMTVMAE1KTGVRSVISYLLSPLKETINES | |
| | | LRER | |
| 2653 | Enterokinase | DDDDK | N/A |
| | cleavage site (EK) | | |
| 2654 | Truncated maltose- | MKIEEGKLVIWINGDKGYNGLAEVGKKFEKDTGIK | WP_ |
| | binding protein | VTVEHPDKLEEKFPQVAATGDGPDIIFWAHDRFGGY | 052916395 |
| | (MBP) (deletion 2- | AQSGLLAE1TPDKAFQDKLYPFTWDAVRYNGKL1A | |
| | 29) | YPIAVEALSL1YNKDLLPNPPKTWEE1PALDKELKAK | |
| | | GKSALMFNLQEPYFTWPL1AADGGYAFKYENGKYD | |
| | | IKDVGVDNAGAKAGLTFLVDL1KNKHMNADTDYSI | |
| | | AEAAFNKGETAMTINGPWAWSNIDTSKVNYGVTVL | |
| | | PTFKGQPSKPFVGVLSAGINAASPNKELAKEFLENYL | |
| | | LTDEGLEAVNKDKPLGAVALKSYEEELAKDPRIAAT | |
| | | MENAQKGEIMPNIPQMSAFWYAVRTAVINAASGRQ | |
| | | TVDEALKDAQTRITK | |
| 2655 | Capistruin | GTPGFQTPDARVISRFGFN(G1-D9 cyclized) | |
| | (Burkholderia | | |
| | thailandensis) | | |
| 2656 | Capistruin precursor | MVRLLAKLLRSTIHGSNGVSLDAVSSTHGTPGFQTP | WP_ |
| | A | DARVISRFGFN | 009905508 |
| | (Burkholderia | | |
| | thailandensis) | | |
| 2657 | Capistruin peptidase | MTPASHCHIAVFDQAIVALDMQRSRYFLYDEACAK | WP_ |
| | B | AFADHYLDFKPIDAPHALKPLISDRIVVAASPASVPK | 009905509 |
| | (Burkholderia | RIADYRGWAFDAFDSGIWASRTLGERSAAGFEWLP | |
| | thailandensis) | FWRIVRGAVSLKMRGFRALSALDRLARLDAGAEQR | |
| | | ARTDGGPSRTAERYLRASIWSPFRITCLQMSFALATH | |
| | | LRRENVPAQLVIGVRPMPFVAHAWVEIDGRVCGDE | |
| | | PELKKSYGEIYRTPRHDERAGPFGLAA | |
| 2658 | Capistruin cyclase C | MTLLEAGARARAYLRDAHSRIERSLARARTLQEAR | WP_ |
| | (Burkholderia | DTVTRSVWGAYLLVLDEAASGRRLFMPDPLHSVRL | 045600732 |
| | thailandensis) | YYRTDERGRVDVDPRAANLLDRASIDWNLDYLIEF | |
| | | ACTQFGPLDETPFASVRVVPPGCALVVGPDGRCAIE | |
| | | RAWLPRAQAAGDVRASCAAALDDVYSRIAHSHPSV | |
| | | CAALSGGVDSSAGAIFLRKALGANAPLAAVHLYSTS | |
| | | SPDCYERDMAARVADSIGAQLICIDIDRHLPFSERIVR | |
| | | TPPAALNQDMLFLGIDRAVSNALGPSSVLLEGQGGD | |
| | | LLFRAVPDANAVLDALRSNGWSFALRTAEKLAMLH | |
| | | NDSIPRILLMAAKIALRRRLFGQDAPASQQTMSRLFA | |
| | | SSAPRAAAGRSRRHAPRADAPLDESISMLDRFVSIM | |
| | | TPVTDAAYTSRLNPYLAQPVVEAAFGLRSYDSFDHR | |
| | | NDRIVLREIASAHTPVDVLWRRTKGSFGIGFVKGIVS | |
| | | HYDALRELIRDGVLMRSGRLDEAELEHALKAVRVG | |
| | | QNAAAISVALVGCVEVFCASWQNFVTNRHAAVC | |

### 6.1 Example 1: Making M13 Phage Having a Single Lasso Peptide on p3 Coat Protein with Lasso Formation in the Periplasmic Space

[0515] This example describes the process for making M13 phage having a single lasso peptide fused to the p3 coat protein, wherein the lasso is formed in the periplasmic space of an E. coli cell.

[0516] To display a lasso peptide on the surface of M13 phage, two recombinant DNA plasmids are generated: the ssPelB-fusilassin-TEV-p3 phagemid and the ssTorA-B/ssTorA-C/ssTorA-RRE plasmid as shown in FIG. 3. The phagemid and plasmid vectors are constructed to express the proteins and enzymes for lasso peptide formation and used in conjunction with a helper phage for displaying fusilassin lasso peptide as a p3 fusion protein on M13 phage. Helper phage M13K07 (New England Biolabs, Cat. #N0315S), containing the P15A E. coli replication origin and the kanamycin resistance gene, is used to supply phage structural proteins, such as p2, p3, p5, p6, p7, p8 and p9 for single-stranded phagemid packaging and phage particle maturation. M13K07 caries a gene II mutation that renders it 50-fold less efficient than the recombinant ssPelB-fusilassin-TEV-p3 phagemid vector at producing progeny (+) strands for packaging. Therefore, the vast majority of phage particles contain the ssPelB-fusilassin-TEV-p3 phagemid vector, not the M13KO7 genome.

[0517] To generate the ssPelB-fusilassin-TEV-p3 phagemid, the fusilassin precursor sequence A is fused in front of a truncated M13 phage p3 coat protein (residues 205-406) and behind an IPTG-inducible promoter and a PelB secretion sequence (Met-Lys-Tyr-Leu-Leu-Pro-Thr-Ala-Ala-Ala-Gly-Leu-Leu-Leu-Leu-Ala-Ala-Gln-Pro-Ala-Met-Ala↓)(SEQ ID NO: 2643). The TEV protease recognition sequence (Glu-Asn-Leu-Tyr-Phe-Gln↓Gly) (SEQ ID NO: 2645) flanked by two linker sequences, Linker 1 and Linker 2, is then inserted in-flame in between the fusilassin precursor sequence A and the truncated p3 coat protein. The PelB secretion sequence (ssPelB) targets the ssPelB-fusilassin-TEV-p3 fusion protein for periplasmic secretion via the Sec-mediated secretion machinery. And the TEV protease recognition sequence can be cleaved by TEV protease to release fusilassin from the p3 coat protein on the mature M13 phage for validation of lasso conformation by mass spectrometry. The constructed ssPelB-fusilassin-TEV-p3 fusion sequence is then cloned into the pComb3 vector (Creative Biolabs, Cat. #VPT4010), an M13 phagemid containing the pUC E. coli replication origin, the F1 phage replication origin, and the ampicillin resistance gene. Upon the periplasmic secretion of the ssPelB-fusilassin-TEV-p3 fusion protein, the PelB secretion sequence is cleaved off and the fusilassin precursor peptide A fused to the p3 coat protein is subsequently inserted into the inner membranes of E. coli.

To generate the ssTorA-B/ssTorA-C/ssTorA-RRE plasmid, the fusilassin peptidase (B), cyclase (C) and RiPP Recognition Element (RRE) are individually cloned behind an IPTG-inducible promoter and a TorA secretion sequence (ssTorA) on a separate plasmid containing the chloramphenicol resistance gene to create three ssTorA fusion proteins, ssTorA-B, ssTorA-C and ssTorA-RRE. The TorA secretion sequence targets the folded fusilassin processing enzymes B, C and RRE to the periplasm via the Tat secretion machinery. Upon the periplasmic secretion, the TorA secretion sequence is cleaved off to yield untagged B, C and RRE proteins that can catalyze lasso peptide formation in the periplasm.

[0518] To produce the M13 phage displaying lasso peptide, the fusilassin phagemid and the ssTorA-B/ssTorA-C/ssTorA-RRE plasmid are first transformed into E. coli SS320 (Lucigen, Cat #60512-1) via electroporation following the manufacturer's instructions. The E. coli SS320 strain contains the tetracycline resistance gene as a selection marker. Following transformation, the E. coli cells are recovered in 1 mL of 2×YT medium for 1 hour at 37° C. in an incubator shaker at 250 rpm. After one-hour incubation, one-tenth of the culture (100 μL) is spread on 2×YT agar containing 100 μg/mL ampicillin, 25 μg/mL chloramphenicol, and 10 μg/mL tetracycline. The 2×YT agar plate is incubated overnight at 37° C. to yield single colonies. The next day, a single isolated colony from the overnight plate is used to prepare a 5 mL overnight culture in 2×YT containing 2% (w/v) glucose, 100 μg/mL ampicillin, 25 μg/mL chloramphenicol, and 10 μg/mL tetracycline. This overnight culture is subsequently used to inoculate a fresh culture of 2×YT at 1% v/v (1 mL/100 mL) containing 2% (w/v) glucose and the same antibiotics. The freshly inoculated culture is grown at 37° C. in an incubator shaker at 250 rpm for 4 to 5 hours with OD₆₀₀ monitored every 30 minutes. When the culture reaches mid-log phase (OD₆₀₀=0.4-0.5), helper phage M13KO7 stock at 10¹² pfu/mL is added to the culture at a ratio of 1:500 (v/v) helper phage:culture media. After addition of helper phage, the culture is further incubated at 37° C. in an incubator shaker at 250 rpm for 1 hour to allow phage transfection. Following the one-hour incubation, kanamycin is added at 60 μg/mL to remove any uninfected E. coli cells. To initiate phage production, the expression of ssPelB-fusilassin-TEV-p3, ssTorA-B, ssTorA-C and ssTorA-RRE is induced with IPTG at 1 mM. The induced culture is then incubated at 28° C. in an incubator shaker at 250 rpm for 24 hours to produce phage. During the phage assembly, the simultaneous presence of two to three copies of the wild-type p3 coat protein (encoded by the helper phage) facilitates efficient assembly of infective phage. As the result, the fusilassin-TEV-p3 fusion protein is displayed at two to three copies per phage particle.

[0519] Following the production of phage, the E. coli cells are removed by two successive centrifugation steps (14,000×g, 15 minutes, 4° C.). The upper 80% of the supernatant is collected and mixed with one-fourth volume of polyethylene glycol 8000 (PEG 8000)/NaCl solution (20% PEG 8000, 2.5 M NaCl). The thoroughly mixed sample is placed on ice overnight to precipitate the phage. After overnight incubation on ice, the phage is pelleted by centrifugation at 11,000×g for 10 minutes at 4° C. The supernatant is discarded, and the pellet is resuspended in 2 mL of PBS buffer (pH=7.4). The resuspended sample is then centrifuged again at 14,000×g for 15 minutes at 4° C. to pellet insoluble debris. After precipitation of insoluble debris, the supernatant is transferred to a fresh tube and the phage is precipitated for the second time by adding one-fourth volume of polyethylene glycol 8000 (PEG 8000)/NaCl solution (20% PEG 8000, 2.5 M NaCl). The sample is then thoroughly mixed and placed on ice for at least two hours. The phage is again pelleted by centrifugation at 11,000×g for 10 minutes at 4° C. The supernatant is discarded, and the pelleted phage is resuspended in 500 mL of PBS buffer (pH=7.4). The concentration of the phage is determined by UV absorbance as described by Day and Wiseman (The Single-Stranded DNA Phages, Cold Spring Harbor, N.Y., 1978, p 605): phage concentration (phages/mL)=((A₂₆₉−A320)×6×10¹⁶)/(phage genome size in nt)×dilution factor. The resuspended phage supernatant is passed through a 0.22 μm filter for sterilization.

[0520] To detect display of fusilassin lasso peptide on the mature phage, the filtered M13 phage is treated with TEV protease (Sigma Cat. #T4455) to release fusilassin lasso peptide following the manufacturer's instructions. The protease digestion reaction is then treated with an equal volume of methanol, thoroughly mixed and centrifuged to precipitate insoluble debris. The soluble faction which contains released fusilassin lasso peptide fused to Linker 1 and part of TEV protease recognition site (Fusilassin-Linker 1-Glu-Asn-Leu-Tyr-Phe-Gln) is concentrated and subjected to MALDT-TOF MS analysis. The presence of the ssPelB-fusilassin-TEV-p3 DNA sequence in the mature phage is also independently detected by PCR amplification and DNA sequencing.

### 6.2 Example 2: Making M13 Phage Having a Single Lasso Peptide on p8 Coat Protein with Lasso Formation in the Periplasmic Space

[0521] This example describes methods for making M13 phage having a single lasso peptide on p8 coat protein, wherein the lasso is formed in the periplasmic space of an E. coli cell.

[0522] To display a lasso peptide on the surface of M13 phage, two recombinant DNA plasmids are generated: the ssPelB-fusilassin-TEV-p8 phagemid and the ssTorA-B/ssTorA-C/ssTorA-RRE plasmid. The phagemid and plasmid vectors are constructed to express the proteins and enzymes for lasso peptide formation and used in conjunction with a helper phage for displaying fusilassin lasso peptide as a p8 fusion protein on M13 phage. Helper phage M13KO7 (New England Biolabs, Cat. #N0315S), containing the P15A E. coli replication origin and the kanamycin resistance gene, is used to supply the phage structural proteins, such as p2, p3, p5, p6, p7, p8 and p9 for single-stranded phagemid packaging and phage particle maturation. M13K07 carries a gene II mutation that renders it 50-fold less efficient than the recombinant fusilassin-p8 phagemid vector at producing progeny (+) strands for packaging. Therefore, the vast majority of phage particles contain the ssPelB-fusilassin-TEV-p8 phagemid vector, not the M13KO7 genome.

[0523] To generate the ssPelB-fusilassin-TEV-p8 phagemid, the fusilassin precursor sequence A is fused to the N terminus of an M13 phage p8 coat protein (residues 24-73) and behind an IPTG-inducible promoter and a PelB secretion sequence (Met-Lys-Tyr-Leu-Leu-Pro-Thr-Ala-Ala-Ala-Gly-Leu-Leu-Leu-Leu-Ala-Ala-Gln-Pro-Ala-Met-Ala↓)(SEQ ID NO: 2643). The TEV protease recognition sequence (Glu-Asn-Leu-Tyr-Phe-Gln↓Gly) (SEQ ID NO: 2645) flanked by two linker sequences, Linker 1 and Linker 2, is then inserted in-flame in between the fusilassin precursor sequence A and the p8 coat protein. The PelB secretion sequence (ssPelB) targets the ssPelB-fusilassin-TEV-p8 fusion protein for periplasmic secretion via the Sec-mediated secretion machinery. And the TEV protease recognition sequence can be cleaved by TEV protease to release fusilassin from the p8 coat protein on the mature M13 phage for validation of lasso conformation by mass spectrometry. The constructed ssPelB-fusilassin-TEV-p8 fusion sequence is then cloned into the pComb8 vector (Creative Biolabs, Cat. #VPT4010), an M13 phagemid containing the pUC E. coli replication origin, the F1 phage replication origin, and the ampicillin resistance gene. Upon the periplasmic secretion of the ssPelB-fusilassin-TEV-p8 fusion protein, the PelB secretion sequence is cleaved off and the fusilassin precursor peptide A fused to the p8 coat protein is subsequently inserted into the inner membranes of E. coli.

To generate the ssTorA-B/ssTorA-C/ssTorA-RRE plasmid, the fusilassin peptidase (B), cyclase (C) and RiPP Recognition Element (RRE) are individually cloned behind an IPTG-inducible promoter and a TorA secretion sequence (ssTorA) on a separate plasmid containing the chloramphenicol resistance gene to create three ssTorA fusion proteins, ssTorA-B, ssTorA-C and ssTorA-RRE. The TorA secretion sequence targets the folded fusilassin processing enzymes B, C and RRE to the periplasm via the Tat secretion machinery. Upon the periplasmic secretion, the TorA secretion sequence is cleaved off to yield untagged B, C and RRE proteins that can catalyze lasso peptide formation in the periplasm.

[0524] To produce the M13 phage displaying lasso peptide, the fusilassin phagemid and the ssTorA-B/ssTorA-C/ssTorA-RRE plasmid are first transformed into E. coli SS320 (Lucigen, Cat #60512-1) via electroporaiion following the manufacturer's instructions. The E. coli SS320 strain contains the tetracycline resistance gene as a selection marker. Following transformation, the E. coli cells are recovered in 1 mL of 2×YT medium for 1 hour at 37° C. in an incubator shaker at 250 rpm. After one-hour incubation, one-tenth of the culture (100 μL) is spread on 2×YT agar containing 100 μg/mL ampicillin, 25 μg/mL chloramphenicol, and 10 μg/mL tetracycline. The 2×YT agar plate is incubated overnight at 37° C. to yield single colonies. The next day, a single isolated colony from the overnight plate is used to prepare a 5 mL overnight culture in 2×YT containing 2% (w/v) glucose, 100 μg/mL ampicillin, 25 μg/mL chloramphenicol, and 10 μg/mL tetracycline. This overnight culture is subsequently used to inoculate a fresh culture of 2×YT at 1% v/v (1 mL/100 mL) containing 2% (w/v) glucose and the same antibiotics. The freshly inoculated culture is grown at 37° C. in an incubator shaker at 250 rpm for 4 to 5 hours with OD₆₀₀ monitored every 30 minutes. When the culture reaches mid-log phase (OD600=0.4-0.5), helper phage M13KO7 stock at 10¹² pfu/mL is added to the culture at a ratio of 1:500 (v/v) helper phage:culture media. After addition of helper phage, the culture is further incubated at 37° C. in an incubator shaker at 250 rpm for 1 hour to allow phage transfection. Following the one-hour incubation, kanamycin is added at 60 μg/mL to remove any uninfected E. coli cells. To initiate phage production, the expression of ssPelB-fusilassin-p8, ssTorA-B, ssTorA-C and ssTorA-RRE is induced with IPTG at 1 mM. The induced culture is then incubated at 28° C. in an incubator shaker at 250 rpm for 24 hours to produce phage. During the phage assembly, the simultaneous presence of the wild-type p8 coat protein (encoded by the helper phage) facilitates efficient assembly of infective phage. As the result, the fusilassin-TEV-p8 fusion protein is displayed at approximately two hundred copies per phage particle. Following the production of phage, the E. coli cells are removed by two successive centrifugation steps (14,000×g, 15 minutes, 4° C.). The upper 80% of the supernatant is collected and mixed with one-fourth volume of polyethylene glycol 8000 (PEG 8000)/NaCl solution (20% PEG 8000, 2.5 M NaCl). The thoroughly mixed sample is placed on ice overnight to precipitate the phage. After overnight incubation on ice, the phage is pelleted by centrifugation at 11,000×g for 10 minutes at 4° C. The supernatant is discarded, and the pellet is resuspended in 2 mL of PBS buffer (pH=7.4). The resuspended sample is then centrifuged again at 14,000×g for 15 minutes at 4° C. to pellet insoluble debris. After precipitation of insoluble debris, the supernatant is transferred to a fresh tube and the phage is precipitated for the second time by adding one-fourth volume of polyethylene glycol 8000 (PEG 8000)/NaCl solution (20% PEG 8000, 2.5 M NaCl). The sample is then thoroughly mixed and placed on ice for at least two hours. The phage is again pelleted by centrifugation at 11,000×g for 10 minutes at 4° C. The supernatant is discarded, and the pelleted phage is resuspended in 500 mL of PBS buffer (pH=7.4). The concentration of the phage is determined by UV absorbance as described by Day and Wiseman (The Single-Stranded DNA Phages, Cold Spring Harbor, N.Y., 1978, p 605): phage concentration (phages/mL)=((A₂₆₉−A₃₂₀)×6×10¹⁶)/(phage genome size in nt)×dilution factor. The resuspended phage supernatant is passed through a 0.22 μm filter for sterilization.

[0525] To detect display of fusilassin lasso peptide on the mature phage, the filtered M13 phage is treated with TEV protease (Sigma Cat. #T4455) to release fusilassin lasso peptide following the manufacturer's instructions. The protease digestion reaction is then treated with an equal volume of methanol, thoroughly mixed and centrifuged to precipitate insoluble debris. The soluble faction which contains released fusilassin lasso peptide fused to Linker 1 and part of TEV protease recognition site (Fusilassin-Linker 1-Glu-Asn-Leu-Tyr-Phe-Gln) is concentrated and subjected to MALDT-TOF MS analysis. The presence of the PelB-fusilassin-TEV-p8 DNA sequence in the mature phage is also independently detected by PCR amplification and DNA sequencing.

### 6.3 Example 3: Making M13 Phage Having a Single Lasso Peptide on p3 Coat Protein with Lasso Formation in the Extracellular Space

[0526] This example describes methods for making M13 phage having a single lasso peptide on p3 coat protein, wherein the lasso is formed in the extracellular space of an E. coli cell.

To display a lasso peptide on the surface of M13 phage, generate two recombinant DNA plasmids are generated: the ssPelB-fusilassin-TEV-p3 phagemid and the B-HlyA/C-HlyA/RRE-HlyA plasmid as shown in FIG. 4. The phagemid and plasmid vectors are constructed to express the proteins and enzymes for lasso peptide formation and used in conjunction with a helper phage for displaying fusilassin lasso peptide as a p3 fusion protein on M13 phage. Helper phage M13KO7 (New England Biolabs, Cat. #N0315 S), containing the PISA E. coli replication origin and the kanamycin resistance gene, is used to supply the phage structural proteins, such as p2, p3, p5, p6, p7, p8 and p9 for single-stranded phagemid packaging and phage particle maturation. M13KO7 carves a gene II mutation that renders it 50-fold less efficient than the recombinant ssPelB-fusilassin-TEV-p3 phagemid vector at producing progeny (+) strands for packaging. Therefore, the vast majority of phage particles contain the ssPelB-fusilassin-TEV-p3 phagemid vector, not the M13KO7 genome.

[0527] To generate the ssPelB-fusilassin-TEV-p3 phagemid, the fusilassin precursor sequence A is fused to the N terminus of a truncated M13 phage p3 coat protein (residues 205-406) and behind an IPTG-inducible promoter and a PelB secretion sequence (Met-Lys-Tyr-Leu-Leu-Pro-Thr-Ala-Ala-Ala-Gly-Leu-Leu-Leu-Leu-Ala-Ala-Gln-Pro-Ala-Met-Ala.↓)(SEQ ID NO: 2643). The TEV protease recognition sequence (Glu-Asn-Leu-Tyr-Phe-Gln↓Gly) (SEQ ID NO: 2645) flanked by two linker sequences, Linker 1 and Linker 2, is then inserted in-frame in between the fusilassin precursor sequence A and the truncated p3 coat protein. The PelB secretion sequence (ssPelB) targets the ssPelB-fusilassin-TEV-p3 fusion protein for periplasmic secretion via the Sec-mediated secretion machinery. And the TEV protease recognition sequence can be cleaved by TEV protease to release fusilassin from the p3 coat protein on the mature M13 phage for validation of lasso conformation by mass spectrometry. The constructed ssPelB-fusilassin-TEV-p3 fusion sequence is then cloned into the pComb3 vector (Creative Biolabs, Cat. #VPT4010), an M13 phagemid containing the pUC E. coli replication origin, the F1 phage replication origin, and the ampicillin resistance gene. Upon the periplasmic secretion of the ssPelB-fusilassin-TEV-p3 fusion protein, the PelB secretion sequence is cleaved off and the fusilassin precursor peptide A fused to the p3 coat protein is subsequently inserted into the inner membranes of E. coli and incorporated into the phage particle during phage assembly.

To generate the B-HyA/C-HlyA/RRE-HlyA plasmid, the fusilassin peptidase (B), cyclase (C) and RiPP Recognition Element (RRE) are fused in-frame with an enterokinase cleavage site (EK)(Asp-Asp-Asp-Asp-Lys) (SEQ ID NO:2653) and the C-terminal portion of HlyA (residues 806-1024) to create three fusion sequences, B-EK-HlyA, C-EK-HlyA and RRE-EK-HlyA, each of which is independently expressed by an IPTG-inducible promoter. The most C temrinal portion of HlyA sequence (residues 965-1024) is a secretion signal that directs the extracellular secretion of the three fusion proteins via the alpha-hemolysin secretion complex, composed of HlyB, HlyD and TolC, spanning across both the inner and outer membranes. TolC is an endogenous E. coli outer membrane protein. To supply HlyB and HlyD, a HlyB/HlyD gene expression cassette is cloned into the same plasmid under a constitutive promoter. Upon the extracellular secretion, the fused HlyA sequence can be cleaved off by the addition of recombinant enterokinase (EMD Millipore, Cat. #69066-3) to yield untagged B, C and RRE proteins, which can process the fusilassin precursor peptide A fused to p3 coat protein and catalyze lasso peptide formation on the mature phage in the extracellular space.

[0528] To produce the M13 phage displaying lasso peptide, the fusilassin phagemid and the B-EK-HlyA/C-EK-HlyA/RRE-EK-HlyA plasmid are first transformed into E. coli SS320 (Lucigen, Cat #60512-1) via electroporation following the manufacturer's instructions. The E. coli SS320 strain contains the tetracycline resistance gene as a selection marker. Following transformation, the E. coli cells are recovered in 1 mL of 2×YT medium for 1 hour at 37° C. in an incubator shaker at 250 rpm. After one-hour incubation, one tenth of the culture (100 μL) is spread on 2×YT agar containing 100 μg/mL ampicillin, 25 μg/mL chloramphenicol, and 10 μg/mL tetracycline. The 2×YT agar plate is incubated overnight at 37° C. to yield single colonies. The next day, a single isolated colony from the overnight plate is used to prepare a 5 mL overnight culture in 2×YT containing 2% (w/v) glucose, 100 μg/mL ampicillin, 25 μg/mL chloramphenicol, and 10 μg/mL tetracycline. This overnight culture is subsequently used to inoculate a fresh culture of 2×YT at 1% v/v (1 mL/100 mL) containing 2% (w/v) glucose and the same antibiotics. The freshly inoculated culture is grown at 37° C. in an incubator shaker at 250 rpm for 4 to 5 hours with OD₆₀₀ monitored every 30 minutes. When the culture reaches mid-log phase (OD₆₀₀=0.4-0.5), helper phage M13K07 stock at 10¹² pfu/mL is added to the culture at a ratio of 1:500 (v/v) helper phage:culture media. After addition of helper phage, the culture is further incubated at 37° C. in an incubator shaker at 250 rpm for 1 hour to allow phage transfection. Following the one-hour incubation, kanamycin is added at 60 μg/mL to remove any uninfected E. coli cells. To initiate phage production, the expression of ssPelB-fusilassin-TEV-p3, B-EK-HlyA, C-EK-HlyA and RRE-EK-HlyA is induced with IPTG at 1 mM. The induced culture is then incubated at 28° C. in an incubator shaker at 250 rpm for 24 hours to produce phage. During the phage assembly, the simultaneous presence of two to three copies of the wild-type p3 coat protein (encoded by the helper phage) facilitates efficient assembly of infective phage. As the result, the fusilassin precursor peptide A-TEV-p3 fusion protein is displayed at two to three copies per phage particle. To catalyze the formation of fusilassin lasso peptide on the mature phage, recombinant enterokinase (EMD Millipore, Cat. #69066-3) is added to the culture media to cleave off the fused HlyA sequence. These extracellular B, C and RRE proteins can then catalyze lasso peptide formation on the mature phage.

[0529] Following the production of phage, the E. coli cells are removed by two successive centrifugation steps (14,000×g, 15 min, 4° C.). The upper 80% of the supernatant is collected and mixed with one-fourth volume of polyethylene glycol 8000 (PEG 8000)/NaCl solution (20% PEG 8000, 2.5 M NaCl). The thoroughly mixed sample is placed on ice overnight to precipitate the phage. After overnight incubation on ice, the phage is pelleted by centrifugation at 11,000×g for 10 minutes at 4° C. The supernatant is discarded, and the pellet is resuspended in 2 mL of PBS buffer (pH=7.4). The resuspended sample is then centrifuged again at 14,000×g for 15 minutes at 4° C. to pellet insoluble debris. After precipitation of insoluble debris, the supernatant is transferred to a fresh tube and the phage is precipitated for the second time by adding one-fourth volume of polyethylene glycol 8000 (PEG 8000)/NaCl solution (20% PEG 8000, 2.5 M NaCl). The sample is then thoroughly mixed and placed on ice for at least two hours. The phage is again pelleted by centrifugation at 11,000×g for 10 minutes at 4° C. The supernatant is discarded, and the pelleted phage is resuspended in 500 mL of PBS buffer (pH=7.4). The concentration of the phage is determined by UV absorbance as described by Day and Wiseman (The Single-Stranded DNA Phages, Cold Spring Harbor, N.Y., 1978, p 605): phage concentration (phages/mL)=((A₂₆₉−A₃₂₀)×6×10¹⁶)/(phage genome size in nt)×dilution factor. The resuspended phage supernatant is passed through a 0.22 μm filter for sterilization.

[0530] To detect display of fusilassin lasso peptide on the mature phage, the filtered M13 phage is treated with TEV protease (Sigma Cat. #T4455) to release fusilassin lasso peptide following the manufacturer's instructions. The protease digestion reaction is then treated with an equal volume of methanol, thoroughly mixed and centrifuged to precipitate insoluble debris. The soluble faction which contains released fusilassin lasso peptide fused to Linker 1 and part of TEV protease recognition site (Fusilassin-Linker 1-Glu-Asn-Leu-Tyr-Phe-Gln) is concentrated and subjected to MALDT-TOF MS analysis. The presence of the ssPelB-fusilassin-TEV-p3 DNA sequence in the mature phage is also independently detected by PCR amplification and DNA sequencing.

### 6.4 Example 4: Making M13 Phage Having a Single Lasso Peptide on p3 Coat Protein with Lasso Formation Catalyzed by Purified Peptidase (B), Cyclase (C) and RRE

[0531] This example describes methods for making M13 phage having a single lasso peptide on p3 coat protein, wherein the lasso formation is catalyzed by purified peptidase (B), cyclase (C) and RRE.

[0532] To display a lasso peptide on the surface of M13 phage, two recombinant DNA plasmids are generated: the ssPelB-fusilassin-TEV-p3 phagemid shown in FIG. 4 and the MBP-B/MBP-C/MBP-RRE plasmid as shown in FIG. 5. The phagemid and plasmid vectors are constructed to express the proteins and enzymes for lasso peptide formation and used in conjunction with a helper phage for displaying fusilassin lasso peptide as a p3 fusion protein on M13 phage. Helper phage M13K07 (New England Biolabs, Cat. #N0315 S), containing the P 15A E. coli replication origin and the kanamycin resistance gene, is used to supply the phage structural proteins, such as p2, p3, p5, p6, p7, p8 and p9 for single-stranded phagemid packaging and phage particle maturation. M13KO7 carries a gene II mutation that renders it 50-fold less efficient than the recombinant ssPelB-fusilassin-TEV-p3 phagemid vector at producing progeny (+) strands for packaging. Therefore, the vast majority of phage particles contain the ssPelB-fusilassin-TEV-p3 phagemid vector, not the M13KO7 genome.

[0533] To generate the ssPelB-fusilassin-TEV-p3 phagemid, the fusilassin precursor sequence A is fused to the N terminus of a truncated M13 phage p3 coat protein (residues 205-406) and behind an IPTG-inducible promoter and a PelB secretion sequence (Met-Lys-Tyr-Leu-Leu-Pro-Thr-Ala-Ala-Ala-Gly-Leu-Leu-Leu-Leu-Ala-Ala-Gln-Pro-Ala-Met-Ala↓)(SEQ ID NO:2643). The TEV protease recognition sequence (Glu-Asn-Leu-Tyr-Phe-Gln↓Gly) (SEQ ID NO:2645) flanked by two linker sequences, Linker 1 and Linker 2, is then inserted in-frame in between the fusilassin precursor sequence A and the truncated p3 coat protein. The PelB secretion sequence (ssPelB) targets the ssPelB-fusilassin-TEV-p3 fusion protein for periplasmic secretion via the Sec-mediated secretion machinery. And the TEV protease recognition sequence can be cleaved by TEV protease to release fusilassin from the p3 coat protein on the mature M13 phage for validation of lasso conformation by mass spectrometry. The constructed ssPelB-fusilassin-TEV-p3 fusion sequence is then cloned into the pComb3 vector (Creative Biolabs, Cat. #VPT4010), an M13 phagemid containing the pUC E. coli replication origin, the F1 phage replication origin, and the ampicillin resistance gene. Upon the periplasmic secretion of the ssPelB-fusilassin-TEV-p3 fusion protein, the PelB secretion sequence is cleaved off and the fusilassin precursor peptide A fused to the p3 coat protein is subsequently inserted into the inner membranes of E. coli and incorporated into the phage particle during phage assembly.

[0534] To generate the recombinant peptidase (B), cyclase (C) and RRE, the truncated maltose binding protein (MBP) devoid of the secretion sequence residues 2-29 is individually fused in-flame with B, C and RRE to created three fusion sequences, MBP-B, MBP-C and MBP-RRE. Each of the three fusion sequences is cloned behind an IPTG-inducible promoter of an E. coli expression vector containing the chloramphenicol resistance gene. To express the fusion proteins, the three expression vectors are individually transformed into E. coli BL21 and induced with 1 mM IPTG for 16 hours at 29° C. The recombinant MBP-B, MBP-C and MBP-RRE proteins are purified using pMAL™ Protein Fusion and Purification System (New England Biolabs, Cat. #E8200S) following the manufacturer's instructions.

[0535] To produce the M13 phage displaying lasso peptide, the ssPelB-fusilassin-TEV-p3 phagemid is first transformed into E. coli SS320 (Lucigen, Cat #60512-1) via electroporaiion following the manufacturer's instructions. The E. coli SS320 strain contains the tetracycline resistance gene as a selection marker. Following transformation, the E. coli cells are recovered in 1 mL of 2×YT medium for 1 hour at 37° C. in an incubator shaker at 250 rpm. After one-hour incubation, one-tenth of the culture (100 μL) is spread on 2×YT agar containing 100 μg/mL ampicillin and 10 μg/mL tetracycline. The 2×YT agar plate is incubated overnight at 37° C. to yield single colonies. The next day, a single isolated colony from the overnight plate is used to prepare a 5 mL overnight culture in 2×YT containing 2% (w/v) glucose, 100 μg/mL ampicillin and 10 μg/mL tetracycline. This overnight culture is subsequently used to inoculate a fresh culture of 2×YT at 1% v/v (1 mL/100 mL) containing 2% (w/v) glucose and the same antibiotics. The freshly inoculated culture is grown at 37° C. in an incubator shaker at 250 rpm for 4 to 5 hours with OD₆₀₀ monitored every 30 minutes. When the culture reaches mid-log phase (OD₆₀₀=0.4-0.5), helperphage M13K07 stock at 10¹² pfu/mL is added to the culture at a ratio of 1:500 (v/v) helper phage:culture media. After addition of helper phage, the culture is further incubated at 37° C. in an incubator shaker at 250 rpm for 1 hour to allow phage transfection. Following the one-hour incubation, kanamycin is added at 60 μg/mL to remove any uninfected E. coli cells. To initiate phage production, the expression of ssPelB-fusilassin-TEV-p3 is induced with IPTG at 1 mM. The induced culture is then incubated at 28° C. in an incubator shaker at 250 rpm for 24 hours to produce phage. During the phage assembly, the simultaneous presence of two to three copies of the wild-type p3 coat protein (encoded by the helper phage) facilitates efficient assembly of infective phage. As the result, the fusilassin precursor peptide A-TEV-p3 fusion protein is displayed at two to three copies per phage particle.

[0536] Following the production of phage, the E. coli cells are removed by two successive centrifugation steps (14,000×g, 15 min, 4° C.). The upper 80% of the supernatant is collected and mixed with one-fourth volume of polyethylene glycol 8000 (PEG 8000)/NaCl solution (20% PEG 8000, 2.5 M NaCl). The thoroughly mixed sample is placed on ice overnight to precipitate the phage. After overnight incubation on ice, the phage is pelleted by centrifugation at 11,000×g for 10 minutes at 4° C. The supernatant is discarded, and the pellet is resuspended in 2 mL of PBS buffer (pH=7.4). The resuspended sample is then centrifuged again at 14,000×g for 15 minutes at 4° C. to pellet insoluble debris. After precipitation of insoluble debris, the supernatant is transferred to a fresh tube and the phage is precipitated for the second time by adding one-fourth volume of polyethylene glycol 8000 (PEG 8000)/NaCl solution (20% PEG 8000, 2.5 M NaCl). The sample is then thoroughly mixed and placed on ice for at least two hours. The phage is again pelleted by centrifugation at 11,000×g for 10 minutes at 4° C. The supernatant is discarded, and the pelleted phage is resuspended in 500 mL of PBS buffer (pH=7.4). The concentration of the phage is determined by UV absorbance as described by Day and Wiseman (The Single-Stranded DNA Phages, Cold Spring Harbor, N.Y., 1978, p 605): phage concentration (phages/mL)=((A₂₆₉−A₃₂₀)×6×10¹⁶)/(phage genome size in nt)×dilution factor. The resuspended phage supernatant is passed through a 0.22 μm filter for sterilization.

[0537] To catalyze the formation of fusilassin lasso peptide on the mature phage, recombinant MBP-B, MBP-C and MBP-RRE proteins are added to the sterilized phage sample in a buffer containing 50 mM Tris-HCl pH 7.5, 125 mM NaCl, 20 mM MgCl₂, 10 mM DTT, and 5 mM ATP. The sample is incubated at 29° C. for 16 hours to catalyze the formation of fusilassin lasso peptide. Following the 16-hour incubation, the sample is passing through an amylose resin column (New England Biolabs, Cat. #E8021 S) to remove the recombinant MBP-B, MBP-C and MBP-RRE proteins. The sample containing the mature phage displaying fusilassin lasso peptide is subject to another around of precipitation and sterilization as described in the previous paragraph.

[0538] To detect display of fusilassin lasso peptide on the mature phage, the filtered M13 phage is treated with TEV protease (Sigma Cat. #T4455) to release fusilassin lasso peptide following the manufacturer's instructions. The protease digestion reaction is then treated with an equal volume of methanol, thoroughly mixed and centrifuged to precipitate insoluble debris. The soluble faction which contains released fusilassin lasso peptide fused to Linker 1 and part of TEV protease recognition site (Fusilassin-Linker 1-Glu-Asn-Leu-Tyr-Phe-Gln) is concentrated and subjected to MALDT-TOF MS analysis. The presence of the ssPelB-fusilassin-TEV-p3 DNA sequence in the mature phage is also independently detected by PCR amplification and DNA sequencing.

### 6.5 Example 5: Making M13 Phage Display Library Having Lasso Peptides on p3 Coat Protein with Lasso Formation in the Periplasmic Space

[0539] This example describes methods for making M13 phage display library having lasso peptides on p3 coat protein, wherein the lasso is formed in the periplasmic space of an E. coli cell.

[0540] To produce an M13 phage library displaying wild-type and mutant fusilassin lasso peptides, a ssPelB-fusilassin A*-TEV-p3 phagemid library is generated and the ssTorA-B/ssTorA-C/ssTorA-RRE plasmid as shown in FIG. 3. The phagemid library and plasmid vectors are constructed to express the proteins and enzymes for lasso peptide formation and used in conjunction with a helper phage for displaying both wild-type and mutant fusilassin lasso peptides as a p3 fusion protein on M13 phage. Helper phage M13KO7 (New England Biolabs, Cat. #N0315S), containing the P15A E. coli replication origin and the kanamycin resistance gene, is used to supply the phage structural proteins, such as p2, p3, p5, p6, p7, p8 and p9 for single-stranded phagemid packaging and phage particle maturation. M13K07 carries a gene II mutation that renders it 50-fold less efficient than the recombinant ssPelB-fusilassin A*-TEV-p3 phagemid vector at producing progeny (+) strands for packaging. Therefore, the vast majority of phage particles contain the PelB-fusilassin A*-TEV-p3 phagemid vector, not the M13KO7 genome.

[0541] To generate the ssPelB-fusilassin A*-TEV-p3 phagemid library, the DNA sequences encoding either wild-type or mutant fusilassin precursor peptides (fusilassin A*) are individually synthesized and arrayed on 96-well plates by Twist Bioscience, Corp. The synthesized DNA sequences are cloned into a modified phagemid derived from pComb3 vector (Creative Biolabs, Cat. #VPT4010), an M13 phagemid containing the pUC E. coli replication origin, the F1 phage replication origin, and the ampicillin resistance gene. The resulting phagemid library expresses wild-type or mutant fusilassin precursor peptides as a PelB-fusilassin A*-TEV-p3 fusion protein from an IPTG-inducible promoter. The PelB secretion sequence (ssPelB) targets the ssPelB-fusilassin A*-TEV-p3 fusion protein for periplasmic secretion via the Sec-mediated secretion machinery. And the TEV protease recognition sequence, flanked by two linker sequences, Linker 1 and Linker 2, can be cleaved by TEV protease to release lasso peptides from the p3 coat protein on the mature M13 phage for validation of lasso conformation by mass spectrometry. Upon the periplasmic secretion of the ssPelB-fusilassin A*-TEV-p3 fusion protein, the PelB secretion sequence is cleaved off and each fusilassin precursor A* peptide fused to the p3 coat protein is subsequently inserted into the inner membranes of E. coli.

[0542] To generate the ssTorA-B/ssTorA-C/ssTorA-RRE plasmid, the fusilassin peptidase (B), cyclase (C) and RiPP Recognition Element (RRE) are individually cloned behind an IPTG-inducible promoter and a TorA secretion sequence (ssTorA) on a separate plasmid containing the chloramphenicol resistance gene to create three ssTorA fusion proteins, ssTorA-B, ssTorA-C and ssTorA-RRE. The TorA secretion sequence targets the folded fusilassin processing enzymes B, C and RRE to the periplasm via the Tat secretion machinery. Upon the periplasmic secretion, the TorA secretion sequence is cleaved off to yield untagged B, C and RRE proteins that can catalyze lasso peptide formation in the periplasm.

[0543] To produce the M13 phage library displaying lasso peptides, the ssPelB-fusilassin A*-TEV-p3 phagemid library and the ssTorA-B/ssTorA-C/ssTorA-RRE plasmid are first transformed into E. coli SS320 (Lucigen, Cat #60512-1) via electroporation following the manufacturer's instructions. The E. coli SS320 strain contains the tetracycline resistance gene as a selection marker. Following transformation, the E. coli cells are recovered in 1 mL of 2×YT medium for 1 hour at 37° C. in an incubator shaker at 250 rpm. After one-hour incubation, the culture is spread on 2×YT agar containing 100 μg/mL ampicillin, 25 μg/mL chloramphenicol, and 10 μg/mL tetracycline. The 2×YT agar plate is incubated overnight at 37° C. to yield single colonies. The next day, the colonies, consisting of 3× coverage of the library size, from the overnight agar plate are harvested and used to prepare a 5 mL overnight culture in 2×YT containing 2% (w/v) glucose, 100 μg/mL ampicillin, 25 μg/mL chloramphenicol, and 10 μg/mL tetracycline. This overnight culture is subsequently used to inoculate a fresh culture of 2×YT at 1% v/v (1 mL/100 mL) containing 2% (w/v) glucose and the same antibiotics. The freshly inoculated culture is grown at 37° C. in an incubator shaker at 250 rpm for 4 to 5 hours with OD₆₀₀ monitored every 30 minutes. When the culture reaches mid-log phase (OD₆₀₀=0.4-0.5), helper phage M13K07 stock at 10¹² pfu/mL is added to the culture at a ratio of 1:500 (v/v) helper phage:culture media. After addition of helper phage, the culture is further incubated at 37° C. in an incubator shaker at 250 rpm for 1 hour to allow phage transfection. Following the one-hour incubation, kanamycin is added at 60 μg/mL to remove any uninfected E. coli cells. To initiate phage production, the expression of ssPelB-fusilassin A*-TEV-p3, ssTorA-B, ssTorA-C and ssTorA-RRE is induced with IPTG at 1 mM. The induced culture is then incubated at 28° C. in an incubator shaker at 250 rpm for 24 hours to produce phage. During the phage assembly, the simultaneous presence of two to three copies of the wild-type p3 coat protein (encoded by the helper phage) facilitates efficient assembly of infective phage. As the result, each lasso peptide-TEV-p3 fusion protein is displayed at two to three copies per phage particle.

[0544] Following the production of phage, the E. coli cells are removed by two successive centrifugation steps (14,000×g, 15 min, 4° C.). The upper 80% of the supernatant is collected and mixed with one-fourth volume of polyethylene glycol 8000 (PEG 8000)/NaCl solution (20% PEG 8000, 2.5 M NaCl). The thoroughly mixed sample is placed on ice overnight to precipitate the phage. After overnight incubation on ice, the phage is pelleted by centrifugation at 11,000×g for 10 minutes at 4° C. The supernatant is discarded, and the pellet is resuspended in 2 mL of PBS buffer (pH=7.4). The resuspended sample is then centrifuged again at 14,000×g for 15 minutes at 4° C. to pellet insoluble debris. After precipitation of insoluble debris, the supernatant is transferred to a fresh tube and the phage is precipitated for the second time by adding one-fourth volume of polyethylene glycol 8000 (PEG 8000)/NaCl solution (20% PEG 8000, 2.5 M NaCl). The sample is then thoroughly mixed and placed on ice for at least two hours. The phage is again pelleted by centrifugation at 11,000×g for 10 minutes at 4° C. The supernatant is discarded, and the pelleted phage is resuspended in 500 mL of PBS buffer (pH=7.4). The concentration of the phage is determined by UV absorbance as described by Day and Wiseman (The Single-Stranded DNA Phages, Cold Spring Harbor, N.Y., 1978, p 605): phage concentration (phages/mL)=((A₂₆₉−A₃₂₀)×6×10¹⁶)/(phage genome size in nt)×dilution factor. The resuspended phage supernatant is passed through a 0.22 μm filter for sterilization.

To detect display of wild-type and mutant fusilassin lasso peptides on the mature phage, the filtered M13 phage library is diluted and used to infect E. coli cells on soft agar to obtain individual plagues derived from single-phage infection. Ten isolated plaques are individually cultured in 2YT media containing 2% (w/v) glucose and the same antibiotics at 28° C. for 16 hours and subjected to the phage purification procedure as described in the previous paragraph to obtain purified individual phage variants. The purified phage variant samples are individually treated with TEV protease (Sigma Cat. #T4455) to release wild-type and mutant fusilassin lasso peptides following the manufacturer's instructions. The protease digestion reactions are then treated with an equal volume of methanol, thoroughly mixed and centrifuged to precipitate insoluble debris. The soluble factions which contain released wild-type and mutant fusilassin lasso peptides fused to Linker 1 and part of TEV protease recognition site (fusilassin-Linker 1-Glu-Asn-Leu-Tyr-Phe-Gln) are concentrated and subjected to MALDT-TOF MS analysis. The presence of ssPelB-fusilassin A*-TEV-p3 DNA sequences in the mature phage is also independently detected by PCR amplification and DNA sequencing.

### 6.6 Example 6: Directed Evolution of a Single Lasso Peptide to Produce High-Affinity Ligands Via Whole Cell Panning Using M13 Phage Display

[0545] This example describes methods for directed evolution of a single lasso peptide to produce high-affinity ligands of glucagon receptor (GCGR) via whole cell panning using M13 phage display.

[0546] To evolve a lasso peptide to become a high-affinity antagonist of glucagon receptor (GCGR), BI-32169 (Gly-Leu-Pro-Trp-Gly-Cys-Pro-Ser-Asp-Ile-Pro-Gly-Trp-Asn-Thr-Pro-Trp-Ala-Cys) (SEQ ID NO:2636) discovered in Streptomyces sp. (Streicher et al., J. Nat. Prod. 2004, 67, 1528-1531) is chosen as a starting scaffold for evolution. Since the sequence of peptidase (B), cyclase (C) and RRE of BI-32169 have not been identified, peptidase (B), cyclase (C) and RRE of a BI-32169 analog (Gly-Leu-Pro-Trp-Gly-Cys-Pro-Asn-Asp-Leu-Phe-Phe-Val-Asn-Thr-Pro-Phe-Ala-Cys) (SEQ ID NO: 2637) identified in Kibdelosporangium sp. MJ126-NF4 are used to construct the ssTorA-B/ssTorA-C/ssTorA-RRE plasmid. Pavlova et al. (J. Biol. Chem. 2008, 283:25589-95) have shown that lasso peptide processing enzymes B, C and RRE recognize the leader peptide of a lasso precursor peptide and exhibit plasticity toward the core peptide. Moreover, the amino acid sequence of the core peptide can be altered to include mutations, deletions and C terminal extension (Pan and Link. J. Am. Chem. Soc. 2011, 133:5016-23; Zong et al. ACS Chem. Biol. 2016, 11:61-8). Therefore, the leader peptide sequence of BI-32169 is replaced with the leader peptide sequence of the BI-32169 analog to construction the hybrid BI-32169 precursor peptide A (Met-Ile-Lys-Asp-Asp-Glu-Ile-Tyr-Glu-Val-Pro-Thr-Leu-Val-Glu-Val-Gly-Asp-Phe-Ala-Glu-Leu-Thr-Leu-Gly-Leu-Pro-Trp-Gly-Cys-Pro-Ser- Asp-Ile-Pro-Gly-Trp-Asn-Thr-Pro-Trp-Ala-Cys) (SEQ ID NO: 2639) so that this hybrid precursor peptide A can be processed by the BI-32169 analog processing enzymes B, C and RRE from Kibdelosporangium sp. MJ126-NF4 for formation of BI-32169 lasso peptide. Leveraging the plasticity of lasso peptide processing enzymes, individual NNK phage libraries per mutated amino acid position are generated following the procedures described in Example 5.

[0547] To select for antagonists of glucagon receptor (GCGR), the individual NNK phage libraries are screened for their ability to bind GCGR expressed on the surface of CHO-S cells (Life Technologies) in the presence of glucagon (GCG). Following a similar procedure to the whole cell panning method reported by Jones et al., Sci Rep. 2016, 18; 6:26240, the CHO-S cells expressing GCGR are first washed in PBS, then blocked in 5 mL 2% (w/v) milk-PBS (MPBS) with rotation for 30 minutes at 4° C. Approximately, 10¹² phage particles from the phage library stock are also blocked in MPBS. The blocked phage particles are then added to the blocked cells and incubated with rotation for 1 hour at 4° C. in the presence of glucagon. The cells are then washed three times using Wash Buffer (PBS, 0.1% (v/v) Tween-20, pH 5.0), followed by 3 washes with PBS (pH 7.4) to remove unbound phage particles. The bound phage particles are eluted from the cells by incubating the cells in Elution Buffer (75 mM Citrate, pH 2.3) for 6 minutes at room temperature. After centrifugation at 800×g for 5 minutes, the supernatant is neutralized with 1 M Tris (pH 7.5). The neutralized phage eluate is used to infect E. coli SS320 cells transformed with the ssTorA-B/ssTorA-C/ssTorA-RRE plasmid. Phage particles are then prepared for subsequent rounds of phage panning by using M13K07 helper phage. After the first round of phage panning, the phagemid DNA is amplified for DNA sequencing analysis to reveal the amino acids mutations and positions that are beneficial in antagonizing GCG-GCGR binding. These beneficial mutations and positions are then incorporated into the design of a combinatorial phagemid library for next round of sequence selection. Such sequence selection via phage panning can be continued for several rounds with the sequence diversity monitored by DNA sequencing after each round of selection. To evolve for high-affinity antagonists of GCGR, the screening parameters and the composition of binding and washing media, such as incubation time, temperature, pH, salts and detergents, are adjusted to select for antagonists with increased binding affinity. The resulting high-affinity BI32169 mutants are further examined individually for their ability to inhibit calcium influx induced by GCG-GCGR binding using FLIPR® Calcium Assay (Molecular Devices, Cat. #FLIPR Calcium 6) with Ready-to-Assay™ Glucagon Receptor Frozen Cells (EMD Millipore, Cat. #HTS112RTA).

### 6.7 Example 7: In Vitro Selection and Evolution of a Lasso Peptide Library to Enrich High-Affinity Ligands Via Whole Cell Panning Using M13 Phage Display

[0548] The example describes methods of in vitro selection and evolution of a lasso peptide library to enrich high-affinity ligands of glucagon receptor (GCGR) via whole cell panning using M13 phage display.

[0549] To screen for high-affinity antagonists of glucagon receptor (GCGR) using M13 phage display, a phage library is designed to display lasso peptides with the size of the ring ranging from 7, 8 to 9 amino acid residues and each of the core peptide residues mutated, except for the residue(s) for the ring formation. To produce this phage library, the fusilassin precursor peptide A (Met-Glu-Lys-Lys-Lys-Tyr-Thr-Ala-Pro-Gln-Leu-Ala-Lys-Val-Gly-Glu-Phe-Lys-Glu-Ala-Thr-Gly↓Trp-Tyr-Thr-Ala-Glu-Trp-Gly-Leu-Glu-Leu-Ile-Phe-Val-Phe-Pro-Arg-Phe-Ile) (SEQ ID NO: 2632) is chosen as a starting sequence and follow the procedures described in Examples 5 and 6 to replace the fusilassin core peptide sequence (Trp-Tyr-Thr-Ala-Glu-Trp-Gly-Leu-Glu-Leu-Ile-Phe-Val-Phe-Pro-Arg-Phe-Ile)(SEQ ID NO: 2631) with one of the following coding sequences NNK-NNK-NNK-NNK-NNK-NNK-Glu-NNK-NNK-NNK-NNK-NNK-NNK-NNK-NNK-NNK-NNK-NNK-NNK (7-member ring), NNK-NNK-NNK-NNK-NNK-NNK-NNK-Glu-NNK-NNK-NNK-NNK-NNK-NNK-NNK-NNK-NNK-NNK-NNK (8-member ring), or NNK-NNK-NNK-NNK-NNK-NNK-NNK-NNK-Glu-NNK-NNK-NNK-NNK-NNK-NNK-NNK-NNK-NNK-NNK (9-member ring). Each of these coding sequences are synthesized as a pool of oligonucleotides by Twist Bioscience, Corp. and cloned into the modified pComb3 vector followed by the procedures described in Example 5 to produce a large phage library displaying diverse lasso peptides.

[0550] To select for antagonists of glucagon receptor (GCGR), the phage library is screened for their ability to bind GCGR expressed on the surface of CHO-S cells (Life Technologies) in the presence of glucagon (GCG). Following a similar procedure to the whole cell panning method reported by Jones et al., Sci Rep. 2016, 18; 6:26240, the CHO-S cells expressing GCGR are first washed in PBS, then blocked in 5 mL 2% (w/v) milk-PBS (MPBS) with rotation for 30 minutes at 4° C. Approximately, 10¹² phage particles from the phage library stock are also blocked in MPBS. The blocked phage particles are then added to the blocked cells and incubated with rotation for 1 hour at 4° C. in the presence of glucagon. The cells are then washed three times using Wash Buffer (PBS, 0.1% (v/v) Tween-20, pH 5.0), followed by 3 washes with PBS (pH 7.4) to remove unbound phage particles. The bound phage particles are eluted from the cells by incubating the cells in Elution Buffer (75 mM Citrate, pH 2.3) for 6 min at room temperature. After centrifugation at 800 g for 5 minutes, the supernatant is neutralized with 1M Tris (pH 7.5). The neutralized phage eluate is used to infect E. coli SS320 cells transformed with the ssTorA-B/ssTorA-C/ssTorA-RRE plasmid. Phage particles are then prepared for subsequent rounds of phage panning by using M13K07 helper phage. During each round of phage panning, a subpopulation of the phage library is enriched, and the sequence diversity of lasso peptides is monitored by Illumina Next-Gen DNA sequencing. To select for high-affinity antagonists of GCGR, the screening parameters and the composition of binding and washing media, such as incubation time, temperature, pH, salts and detergents, are adjusted to select for antagonists with increased binding affinity. The resulting high-affinity lasso peptides are further examined individually for their ability to inhibit calcium influx induced by GCG-GCGR binding using FLIPR® Calcium Assay (Molecular Devices, Cat. #FLIPR Calcium 6) with Ready-to-Assay™ Glucagon Receptor Frozen Cells (EMD Millipore, Cat. #HTS112RTA).

### 6.8 Example 8: In Vitro Selection and Evolution of a Phage-Display Lasso Peptide Library to Enrich High-Affinity Ligands Targeting Different Binding Pockets of Programmed Cell Death Protein-1 (PD-1)

[0551] The example describes methods for in vitro selection and evolution of a phage-display lasso peptide library to enrich high-affinity ligands targeting different binding pockets of programmed cell death protein-1 (PD-1).

[0552] Inhibition of T-cell immune checkpoints is one of the survival mechanisms that cancer cells elicit to evade the surveillance of the immune system. Among currently known immune checkpoint molecules, programmed cell death protein 1 (PD-1) has attracted much attention from researchers in the immune oncology field in the recent years. The successful development of monoclonal antibodies against PD-1 for treating cancers is typified by nivolumab (Opdivo) and pembrolizumab (Keytruda). At the molecular level, nivolumab and pembrolizumab recognize different epitopes, also known as “binding pockets,” of PD-1; while nivolumab binds the N-loop of PD-1 (Kd=3.06 pM), pembrolizumab targets the CD loop of PD-1 (Kd=29 pM) (Fessas et al. Seminars in Oncology. 2017, 44:136-140).

[0553] To screen and evolve lasso peptides for high affinity ligands targeting different binding pockets of PD-1, a phage-display lasso peptide library is generated following the procedure descried in Example 7. The generated lasso peptide library is then used to target immobilized recombinant PD-1 protein in the presence of recombinant PD-Li (programmed death ligand 1, a native PD-1 ligand), nivolumab or pembrolizumab. Such selection strategies apply directed evolution forces to yield ligands targeting three distinct binding pockets of PD-1 that are separately occupied by PD-L1, nivolumab and pembrolizumab.

[0554] To carry out an in vitro bio-panning, the recombinant human PD-1/Fc chimera protein is purchased from R&D Systems (Cat. #1086-PD) and immobilized on a Protein A coated plate (ThermoFisher, Cat. #15155) following the manufacturer's instruction. The uncoated surface of the plate is blocked with SuperBlock (PBS) blocking buffer (ThermoFisher, Cat. #37515) in the presence of 5% bovine serum albumin (BSA). The SuperBlock blocking buffer is removed and replaced with PBS buffer (10 mM bicarbonate phosphate buffer pH 7.4 and 150 mM NaCl). Approximately, 10¹² phage particles from the phage library stock are also blocked in 2% (w/v) milk-PBS (MPBS). The blocked phage particles are then added to the immobilized PD-1 protein on the plate in the presence of PD-L1, nivolumab or pembrolizumab. The plate is incubated for 1 hour at 4° C. and then washed three times using Wash Buffer (PBS, 0.1% (v/v) Tween-20, pH 5.0), followed by 3 washes with PBS (pH 7.4) to remove unbound phage particles. The bound phage particles are eluted from the cells by incubating the cells in Elution Buffer (75 mM Citrate, pH 2.3) for 6 min at room temperature. After centrifugation at 800 g for 5 minutes, the supernatant is neutralized with IM Tris (pH 7.5). The neutralized phage eluate is used to infect E. coli SS320 cells transformed with the ssTorA-B/ssTorA-C/ssTorA-RRE plasmid. Phage particles are then prepared for subsequent rounds of phage panning by using M13K07 helper phage. During each round of phage panning, a subpopulation of the phage library is enriched, and the sequence diversity of lasso peptides is monitored by Illumina Next-Gen DNA sequencing.

[0555] To evolve for high-affinity ligands of PD-1, the screening parameters and the composition of binding and washing media, such as incubation time, temperature, pH, salts and detergents, are adjusted to select for ligands with increased binding affinity. The resulting high-affinity lasso peptides are further examined individually for their ability to specifically block the binding of PD-L1, nivolumab or pembrolizumab to PD-1. The Kd values are obtained from a dose-response curve with ELISA using anti-SBP-tag mouse monoclonal antibody (EMD Millipore, Cat. #MAB 10764) and goat anti-mouse IgG antibody labeled with Alexa Fluor 488 (Abeam, Cat. #ab150077).

### 6.9 Example 9: Making a Phage-Display Lasso Peptide Library from Multiple Lasso Peptide Biosynthetic Gene Clusters

[0556] This example describes the methods for production of a phage-display lasso peptide library from multiple lasso peptide biosynthetic gene clusters (BGCs).

[0557] To produce a phage-display lasso peptide library from multiple lasso peptide biosynthetic gene clusters (BGCs), the DNA coding sequences for lasso peptide precursor (A), peptidase (B), cyclase (C) and Ripp Recognition Element (RRE) from each BGC are codon-optimized, synthesized and used for the construction of the two recombinant DNA plasmids per BGC: the ssPelB-lasso peptide precursor A-TEV-p3 phagemid shown in FIG. 4 and the MBP-B/MBP-C/MBP-RRE plasmid as shown in FIG. 5.

[0558] Following the procedure described in Example 4, each lasso peptide member of the phage-display library is individually generated with lasso formation catalyzed by purified peptidase (B), cyclase (C) and RRE from the respective BGC. For example, fusilassin precursor peptide A, displayed on the phage particle, is converted to fusilassin lasso peptide by purified MBP-fusilassin B, MBP-fusilassin C and MBP-fusilassin RRE; the BI-32169 analog precursor peptide A, displayed on the phage particle, is converted to the BI-32169 analog lasso peptide by purified MBP-the BI-32169 analog B, MBP-the BI-32169 analog C and MBP-the BI-32169 analog RRE; capistruin precursor peptide A, displayed on the phage particle, is converted to capistruin lasso peptide by purified MBP-capistruin B, and MBP-capistruin C.

[0559] The formation of lasso conformation is detected by MALDT-TOF MS analysis as described in Example 4. Upon formation of lasso peptides on the phage particles, the individual lasso peptide members are either pooled to create a phage-display lasso peptide library or individually deposited in the separate wells of a 96-well plate to create an arrayed phage-display lasso peptide library.

TABLE B
The list of protein sequences described
in the following Examples 10-14.

| SEQ | | | GenBank |
|---|---|---|---|
| ID | | | Accession |
| NO: | Name | A.A. sequence | # |
| 2659 | HOC | MTFTVDITPKTPTGVIDETK | NP_ |
| | (T4 phage) | QFTATPSGQTGGGTITYAWS | 049793 |
| | | VDNVPQDGAEATFSYVLKGP | |
| | | AGQKTIKVVATNTLSEGGPE | |
| | | TAEATTTITVKNKTQTTTLA | |
| | | VTPASPAAGVIGTPVQFTAA | |
| | | LASQPDGASATYQWYVDDSQ | |
| | | VGGETNSTFSYTPTTSGVKR | |
| | | IKCVAQVTATDYDALSVTSN | |
| | | EVSLTVNKKTMNPQVTLTPP | |
| | | SINVQQDASATFTANVTGAP | |
| | | EEAQITYSWKKDSSPVEGST | |
| | | NVYTVDTSSVGSQTIEVTAT | |
| | | VTAADYNPVTVTKTGNVTVT | |
| | | AKVAPEPEGELPYVHPLPHR | |
| | | SSAYIWCGWWVMDEIQKMTE | |
| | | EGKDWKTDDPDSKYYLHRYT | |
| | | LQKMMKDYPEVDVQESRNGY | |
| | | IIHKTALETGIIYTYP | |
| 2660 | SOC | MASTRGYVNIKTFEQKLDGN | NP_ |
| | (T4 phage) | KKIEGKEISVAFPLYSDVHK | 049644 |
| | | ISGAHYQTFPSEKAAYSTVY | |
| | | EENQRTEWIAANEDLWKVTG | |

[0560] T4 phage is a large double-stranded DNA virus that infects E. coli. The phage particle consists of a capsid head and a tail with a sheath terminating in a base plate to which six tail fibers are attached. The 168 kb DNA genome of T4 phage is packed into the capsid head during the assembly of phage particles (Miller E S. et al., Microbiol Mol Biol Rev. 2003, 67(1):86-156). Unlike filamentous phages (e.g. M13 phage) that require periplasmic secretion of coat proteins for assembly of progeny phage particles, T4 phage, an archetype of lytic phages, assembles the progeny phage particles in the cytoplasm of the bacterial host cell. Therefore, lytic phages, such as T4, T7, lambda (λ), phi X 174 (ϕX 174) and MS2, do not require periplasmic secretion of phage coat proteins. Instead, the T4 progeny phages are released from the cytoplasm by lysis of the bacterial cell wall at the late stage of the lytic infection cycle (Bazan et al., Hum Vaccin Immunother. 2012, 8(12):1817-28). Furthermore, recent studies demonstrated that lytic phages, such as T4, T7, phi X 174 (ϕX 174) and MS2, can be entirely synthesized from their genome in one pot reactions using an E. coli, cell-free TX-TL system (Shin J. et al., ACS Synth Biol. 2012, 1(9):408-13; Rustad M. et al., J Vis Exp. 2017, (126); Rustad M. et al., Synthetic Biology, Volume 3, Issue 1, 1 Jan. 2018, ysy002). Since the discovery of T4 phage in the 1940s, several genetic engineering methods have been developed to enable manipulation of T4 phage genome. These methods include phage genetic cross, DNA homologous recombination, DNA recombineering, CRISPR-Cas-mediated genetic engineering, genome fragment ligation, and de novo phage genome assembly (Pires et al., Microbiol Mol Biol Rev. 2016, 80(3):523-43). Such genetic engineering tools have aided the development of several display systems based on T4, T7, or lambda (λ) phages for molecular evolution, such as affinity maturation of monoclonal antibodies and receptor ligands (Bazan et al., Hum Vaccin Immunother. 2012, 8(12):1817-28; Szardenings et al., J Biol Chem. 1997, 272(44):27943-8; Jiang et al., Infect Immun. 1997, 65(11):4770-7; Burgoon et al., J Immunol. 2001, 167(10):6009-14; Sternberg N. and Hoess R H., Proc Natl Acad Sci USA. 1995, 92(5):1609-13). The examples provided below utilize T4 phage HOC (highly immunogenic outer capsid) protein to display a lasso peptide fused to the N terminus of HOC protein on the surface of the T4 capsid (Jiang et al., Infect Immun. 1997, 65(11):4770-7) (FIG. 6). To further isolate or enrich the lasso peptide-displayed phage particles with affinity chromatography, T4 phage SOC (small outer capsid) protein is also manipulated to display an affinity tag fused to the N-terminus of SOC protein (Li Q. et al., J Mol Biol. 2006, 363(2):577-88; Ceglarek et al., Sci Rep. 2013, 3:3220; Da̧browska K. et al., Methods Mol Biol., 1898:81-87). T4 HOC and SOC are non-essential capsid protein that exhibits high-affinity binding capability to the core capsid. Several studies demonstrated that T4 HOC and SOC can be assembled onto the capsid either during in vivo phage particle assembly (Jiang et al., Infect Immun. 1997, 65(11):4770-7; Ren Z. and Black L W., Gene. 1998, 215(2):439-44) or through in vitro reconstitution of the capsid (Shivachandra S B. Et al., Virology. 2006, 345(1):190-8; Li Q. et al., J Mol Biol. 2007, 370(5):1006-19). Thus, a lasso peptide fused to HOC or SOC can be displayed on the T4 phage capsid: (1) during in vivo assembly of T4 phage particles in an E. coli cell (Example 10), (2) during in vitro assembly of T4 phage particles in a cell-free system (Example 11), (3) by in vitro reconstitution of the T4 phage capsid (Example 12), (4) by in vitro maturation of lasso peptides displayed on the capsid (Example 13), or (5) via competitive assembly of T4 phage particles (Example 14).

### 6.10 Example 10: In Vivo Assembly of T4 Phage Particles in an E. coli Cell

[0561] This example describes the process for making T4 phage having a single lasso peptide fused to the T4 HOC protein, wherein the lasso peptide is formed during in vivo assembly of T4 phage particles in the cytoplasm of an E. coli cell as shown in FIG. 7.

[0562] The wild type T4 phage (ATCC 11303-B4) and E. coli strain B (ATCC 11303) are purchased from ATCC. The mutant T4 phage lacking the hoc and soc gene (hoc⁻soc⁻) is created from the wild type T4 phage by deleting hoc and soc genes with homologous recombination while simultaneously inserting an IPTG inducible E. coli promoter (e.g., pA1). The E. coli strain B is engineered to express lambda (λ) recombinase αβγ enzymes that enable efficient homologous recombination between T4 phage genome and a transformed plasmid vector. Prior to the infection of the mutant T4 phage (hoc⁻soc⁻), the engineered E. coli strain B is first transformed with the plasmid encoding lasso peptide biosynthesis enzymes fused to a maltose-binding protein (MBP-B, MBP-C and MBP-RRE), and subsequently with the second plasmid encoding the protein for lasso precursor peptide-HOC (preLasso-HOC) fusion and the protein for affinity tag-SOC (Tag-SOC) fusion. The double-transformed E. coli cells are then infected with the mutant T4 phage (hoc⁻soc⁻). Following the infection, the parent T4 phage genome (hoc⁻soc⁻) is inserted into the cytoplasm of the E. coli cell, recombined with the lasso-hoc/tag-hoc plasmid, and replicated to produce multiple copies of progeny phage genome that carries the recombined lasso-hoc/tag-hoc coding sequence. From the progeny phage genome, the expression of the recombined lasso-hoc and tag-soc coding sequences is under the control of the pA1 promoter previously inserted next to the site of homologous recombination. During the synthesis of phage structural proteins, the preLasso-HOC fusion protein is simultaneously expressed upon the IPTG induction. Once expressed, the lasso precursor peptide portion of the preLasso-HOC fusion protein is further processed into a mature lasso peptide as a Lasso-HOC fusion protein. During the assembly of T4 progeny phage particles, Lasso-HOC and Tag-SOC are incorporated into the capsid. At the late stage of the lytic infection cycle, the lasso-displayed T4 progeny phage particles are released into the culture media by lysis of the bacterial cell wall.

[0563] The plasmid encoding MBP-B, MBP-C and MBP-RRE is constructed similarly to the ssTorA-B/ssTorA-C/ssTorA-RRE plasmid described in Example 1 by replacing the ssTorA sequence with the sequence encoding the truncated maltose binding protein (MBP) devoid of the secretion sequence residues 2-29. The lasso-hoc/tag-soc plasmid is constructed by cloning the sequence encoding the fusilassin precursor peptide-HOC (fusilassin-HOC) fusion protein and the sequence encoding the six-histidine tag-SOC (6×His-SOC) fusion protein into a cloning (non-expression) vector. The presence of the two 250 bp DNA homology arms in the cloning vector allows insertion of the cloned sequence into the mutant T4 phage genome at the designated recombination site. Following transformation of the two plasmids, the double-transformed E. coli cells are incubated at 37° C. for 18 hours (overnight) under the selection of appropriate antibiotics. The overnight culture is then diluted at 1:100 in LB media and further incubated at 37° C. to reach the exponential growth phase (OD600 of 0.2 to 0.4). This fresh E. coli culture is then infected with the mutant T4 phage (hoc⁻soc⁻) at the multiplicity of infection (MOI) of 10 in the presence of 0.5 mM IPTG to induce expression of fusilassin-HOC and 6×His-SOC. Following the infection, the culture is incubated at 37° C. for 5 to 6 hours until cell lysis occurs. The cell lysate containing the phage particles is cleared of cellular debris by centrifugation at 5,000×g for 30 minutes at 4° C. The resulting supernatant is then filtered through a vacuum-driven filtration system with 0.2 μm pore size (Stericup, Millipore). If the cell lysis is incomplete, PEG precipitation and chloroform extraction may be necessary prior to the filtration step. Following the filtration step, the recombinant T4 phage particles in the filtered supernatant are isolated with affinity chromatography using Ni-NTA resin (QIAGEN) as described by Ceglarek et al. (Sci Rep. 2013, 3:3220). Optionally, the isolated recombinant T4 phage particles can be further purified using sucrose gradient centrifugation or chromatography.

### 6.11 Example 11: In Vitro Assembly of T4 Phage Particles in a Cell-Free System

[0564] This example describes the process for making T4 phage having a single lasso peptide fused to the T4 HOC protein, wherein the lasso peptide is formed during in vitro assembly of T4 phage particles in a cell-free system as shown in FIG. 8.

[0565] The wild type T4 phage (ATCC 11303-B4) and E. coli strain B (ATCC 11303) are purchased from ATCC. The mutant T4 phage lacking the hoc and soc gene (hoc⁻soc⁻) is created from the wild type T4 phage by deleting hoc and soc genes with homologous recombination while simultaneously inserting an IPTG inducible E. coli promoter (e.g., pA1). The T4 phage genomic DNA is extracted as described by Rustad M. et al. (Synthetic Biology, Volume 3, Issue 1, 1 Jan. 2018, ysy002). The E. coli strain B is engineered to express lambda (λ) recombinase αβγ enzymes that enable efficient homologous recombination between T4 phage genome and an added plasmid vector. The cell extracts of the engineering E. coli strain B and the energy buffer are prepared as described by Sun et al. (J Vis Exp. 2013, (79):e50762) and Rustad M. et al. (Synthetic Biology, Volume 3, Issue 1, 1 Jan. 2018, ysy002). The MBP-B/MBP-C/MBP-RRE plasmid and the Fusilassin-HOC/6×His-SOC plasmid are constructed as described in Example 10.

[0566] To produce the fusilassin-displayed T4 phage, the genomic DNA of mutant T4 phage (hoc⁻soc⁻) is added at 1 nM into 40 μL of the cell-free reaction containing 33% of the cell extracts and 66% of the energy buffer. Simultaneously, the MBP-B/MBP-C/MBP-RRE plasmid is added at 20 nM and the fusilassin-HOC/6×His-SOC plasmid is added at 10 nM. Upon the addition of IPTG at 0.5 mM, the cell-flee reaction mixture is incubated at 29° C. for 10-12 hours. During the incubation, the added T4 phage genome is recombined with the fusilassin-HOC/6×His-SOC plasmid and replicated to produce multiple copies of progeny phage genome that carries the recombined fusilassin-HOC/6×His-SOC coding sequence. From the progeny phage genome, the expression of the recombined fusilassin-HOC and 6×His-SOC coding sequences is under the control of the pA1 promoter previously inserted next to the site of homologous recombination. During the synthesis of phage structural proteins, the fusilassin precursor peptide-HOC fusion protein is also expressed upon the IPTG induction. Once expressed, the fusilassin precursor peptide is further processed into a mature lasso peptide. During the assembly of T4 progeny phage particles, fusilassin-HOC and 6×His-SOC are incorporated into the capsid to produce the fusilassin-displayed T4 phage particles in the reaction mixture.

[0567] The cell-flee reaction mixture containing the phage particles is cleared of cellular debris by centrifugation at 5,000×g for 30 minutes at 4° C. The supernatant is further cleared by chloroform extraction and then filtered through a vacuum-driven filtration system with 0.2 μm pore size (Stericup, Millipore). Following the filtration step, the recombinant T4 phage particles in the filtered supernatant are isolated with affinity chromatography using Ni-NTA resin (QIAGEN) as described by Ceglarek et al. (Sci Rep. 2013, 3:3220). Optionally, the isolated recombinant T4 phage particles can be further purified using sucrose gradient centrifugation or chromatography.

### 6.12 Example 12: In Vitro Reconstitution of the T4 Phage Capsid

[0568] This example describes the process for making T4 phage having a single lasso peptide fused to the T4 HOC protein, wherein the isolated lasso peptide-HOC fusion protein is reconstituted in vitro onto the T4 capsid lacking HOC (HOC) as shown in FIG. 9.

[0569] The wild type T4 phage (ATCC 11303-B4) and E. coli strain B (ATCC 11303) are purchased from ATCC. The mutant T4 phage lacking the hoc and soc gene (hoc⁻soc⁻) is created from the wild type T4 phage by deleting hoc and soc genes with homologous recombination. To propagate the mutant T4 phage (hoc⁻soc⁻), the phage particles are prepared in the absence of the MBP-B/MBP-C/MBP-RRE and the lasso-hoc/tag-soc plasmids by either in vivo assembly as described in Example 10 or in vitro cell-free assembly as described in Example 11. To facilitate affinity purification, a plasmid vector encoding the fusilassin-HOC-Strep fusion protein is created to expression the fusilassin-HOC protein fused to a C terminal Strep tag. Both the fusilassin-HOC-Strep and 6×His-SOC fusion proteins are expressed either in vivo (e.g., E. coli) or in vitro (e.g., in a cell-free system) and purified using Strep-Tactin resin (IBA Lifesciences) and Ni-NTA resin (QIAGEN), respectively. The in vitro assembly of fusilassin-HOC-Strep and 6×His-SOC onto the capsid of the mutant T4 phage (hoc⁻soc⁻) is carried out as described by Sathaliyawala et al. (J Virol. 2006, 80(15):7688-98). Briefly, 2×10¹⁰ PFU of isolated mutant T4 phage (hoc⁻soc⁻) are centrifuged at 13,000×g at 4° C. for an hour. The pellets are resuspended in 10 μL of buffer containing 50 mM phosphate buffer [pH 7.0], 75 mM NaCl, and 1 mM MgSO₄. Purified fusilassin-HOC-Strep and 6×His-SOC fusion proteins are added at the desired concentration in a total reaction mixture of 100 μL and incubated at 37° C. for 45 minutes. After the incubation, phages are precipitated by centrifugation at 13,000×g at 4° C. for an hour. The pellet is washed twice with 1 mL of the same buffer and transferred to a new tube or a new well of a 96-well plate. Optionally, the reconstituted T4 phage particles are further purified with affinity chromatography using Ni-NTA resin (QIAGEN) as described by Ceglarek et al. (Sci Rep. 2013, 3:3220).

[0570] Following the similar procedure in parallel, a phage display library is constructed to vary the amino acid composition of the lasso peptide displayed on the capsid. Each member of the phage display library is identified by tube ID number or well position plus plate ID number.

### 6.13 Example 13: In Vitro Maturation of Lasso Peptides Displayed on the Capsid

[0571] This example describes the process for making T4 phage having a single lasso peptide fused to the T4 HOC protein, wherein the lasso precursor peptide-HOC fusion protein, displayed on the T4 capsid, is processed in vitro by isolated lasso peptide biosynthesis enzymes as shown in FIG. 10.

[0572] The recombinant T4 phage (lasso-hoc/tag-soc) displaying fusilassin precursor peptide-HOC and 6×His-SOC fusion proteins is prepared in the absence of the MBP-B/MBP-C/MBP-RRE plasmid as described in Examples 10 and 11. The maturation of fusilassion is catalyze by the purified recombinant MBP-B, MBP-C and MBP-RRE proteins as described in Example 4 (FIG. 5). In this case, the amino acid composition of the lasso peptide (phenotype) displayed on the phage capsid is identified by the genotype of the phage.

[0573] Alternative, the in vitro reconstituted T4 phage (hoc⁻soc⁻) displaying fusilassin precursor peptide-HOC and 6×His-SOC fusion proteins is prepared as described in Example 12, except that the fusilassin precursor peptide-HOC-Strep fusion protein is not pre-processed by the lasso biosynthetic enzyme MBP-B, MBP-C and MBP-RRE. Instead, the maturation of fusilassion is catalyze by the purified recombinant MBP-B, MBP-C and MBP-RRE proteins as described in Example 4 (FIG. 5). In this case, the amino acid composition of the lasso peptide (phenotype) displayed on the phage capsid is identified by tube ID number or well position plus plate ID number.

### 6.14 Example 14: Competitive Phage Display

[0574] This example describes the process for making a competitive T4 phage display having a single lasso peptide fused to the T4 HOC protein, wherein the lasso precursor-HOC fusion protein is competing with unmodified HOC protein for assembly of T4 phage capsid as shown in FIGS. 11A and 11B.

[0575] Without insertion of the lasso peptide coding sequence into the T4 phage genome, the fusilassin-HOC and the 6×His-SOC fusion proteins are incorporated onto the capsid in the presence of wild type HOC and SOC proteins through a technique termed competitive phage display (Ceglarek et al., Sci Rep. 2013, 3:3220). The competitive T4 phage display is generated from one of the three following systems: (1) in vivo assembly as described in Example 10, except that wild type T4 phage is used to infect E. coli cells instead of the mutant T4 phage (hoc⁻soc⁻), (2) in vitro cell-free assembly as described in Example 11, except that wild type T4 phage genome is added into the cell extracts instead of the mutant T4 phage genome (hoc soc), and (3) in vitro reconstitution as described in Example 12, except that HOC and SOC are also presence in the mixture with the fusilassin-HOC-Strep and 6×His-SOC fusion proteins. In the case of competitive T4 phage display, the amino acid composition of the lasso peptide (phenotype) displayed on the phage capsid is identified by tube ID number or well position plus plate ID number.

### 7. SEQUENCES

[0576] Various exemplary amino acid and nucleic acid sequences are disclosed in this application, a summary of which are provided in the Summary Table. Additionally, Table 1 lists exemplary combinations of various components that can be used in connection with the present methods and systems. Table 2 lists example of lasso precursor and lasso core peptides. Table 3 lists examples of lasso peptidase. Table 4 lists examples of lasso cyclase. Table 5 lists examples of RREs.

TABLE 1
Summary Table

| Class | Description | Peptide No: # |
|---|---|---|
| A | Precursors | 1-1315 |
| B | Peptidase | 1316-2336 |
| C* | Cyclase | 2337-3761 |
| E** | RRE | 3762-4593 |
| CE | cyclase-RRE fusion | 2504 |
| CB | cyclase-peptidase fusion | 2903 |
| CE | cyclase-RRE fusion | 3608 |
| EB | RRE-peptidase fusion | 3768 |
| EB | RRE-peptidase fusion | 3770 |
| EB | RRE-peptidase fusion | 3793 |
| EB | RRE-peptidase fusion | 3811 |
| EB | RRE-peptidase fusion | 3818 |
| EB | RRE-peptidase fusion | 3851 |
| EB | RRE-peptidase fusion | 3855 |
| EB | RRE-peptidase fusion | 3887 |
| EB | RRE-peptidase fusion | 4004 |
| EB | RRE-peptidase fusion | 4018 |
| EB | RRE-peptidase fusion | 4045 |
| EB | RRE-peptidase fusion | 4076 |
| EB | RRE-peptidase fusion | 4132 |
| EB | RRE-peptidase fusion | 4150 |
| EB | RRE-peptidase fusion | 4167 |
| EB | RRE-peptidase fusion | 4168 |
| EB | RRE-peptidase fusion | 4225 |
| EB | RRE-peptidase fusion | 4262 |
| EB | RRE-peptidase fusion | 4379 |
| EB | RRE-peptidase fusion | 4414 |
| EB | RRE-peptidase fusion | 4499 |
| EB | RRE-peptidase fusion | 4504 |
| EB | RRE-peptidase fusion | 4507 |
| EB | RRE-peptidase fusion | 4512 |
| EB | RRE-peptidase fusion | 4517 |
| EB | RRE-peptidase fusion | 4518 |
| EB | RRE-peptidase fusion | 4529 |
| EB | RRE-peptidase fusion | 4532 |
| EB | RRE-peptidase fusion | 4542 |
| EB | RRE-peptidase fusion | 4559 |
| EB | RRE-peptidase fusion | 4561 |
| EB | RRE-peptidase fusion | 4562 |

*including CE and CB fusion sequences
**Including EB fusion sequences

TABLE 2
Exemplary Combinations of (i) Lasso Precursor Peptide;
(ii) Lasso Peptidase; (iii) Lasso Cyclase; (iv) RRE;
(v) Peptidase Fusion; and/or (vi) Cyclase Fusion

| Peptide No: #; GI#; | | | | | |
|---|---|---|---|---|---|
| Accession#; Nucleic | | | RRE | CE | EB |
| Acid SEQ ID NO: #; | | | Pep- | Pep- | Pep- |
| Amino Acid SEQ ID | Peptidase | Cyclase | tide | tide | tide |
| NO: #; Junction | Peptide | Peptide | No: | No: | No: |
| Position | No: # | No: # | # | # | # |
| 1; 167643973; | 1598 | 3360 | n/a | n/a | n/a |
| NC_010338.1; | | | | | |
| 1; 2; 22/23 | | | | | |
| 2; 167643973; | 1598 | 3360 | n/a | n/a | n/a |
| NC_010338.1; | | | | | |
| 3; 4; 21/22 | | | | | |
| 3; 167643973; | 1324 | 2349 | n/a | n/a | n/a |
| NC_010338.1; | | | | | |
| 5; 6; 21/22 | | | | | |
| 4; 167643973; | 1324 | 2349 | n/a | n/a | n/a |
| NC_010338.1; | | | | | |
| 7; 8; 22/23 | | | | | |
| 5; 737103862; | 1943 | 3191 | n/a | n/a | n/a |
| NZ_JQJP01000023.1; | | | | | |
| 9; 10; 21/22 | | | | | |
| 6; 737089868; | 1943 | 3191 | n/a | n/a | n/a |
| NZ_JQJN01000025.1; | | | | | |
| 11; 12; 21/22 | | | | | |
| 7; 737089868; | 1942 | 3190 | n/a | n/a | n/a |
| NZ_JQJN01000025.1; | | | | | |
| 13; 14; 21/22 | | | | | |
| 8; 737089868; | 1942 | 3190 | n/a | n/a | n/a |
| NZ_JQJN01000025.1; | | | | | |
| 15; 16; 21/22 | | | | | |
| 9; 930490730; | 2056 | 3614 | 4407 | n/a | n/a |
| NZ_LJCU01000014.1; | | | | | |
| 17; 18; 13/14 | | | | | |
| 10; 930490730; | 2279 | 3681 | 4541 | n/a | n/a |
| NZ_LJCU01000014.1; | | | | | |
| 19; 20; 13/14 | | | | | |
| 11; 657284919; | 1438 | 2500 | 3861 | n/a | n/a |
| JJMG01000143.1; | | | | | |
| 21; 22; 21/22 | | | | | |
| 12; 657284919; | 2114 | 3635 | 4459 | n/a | n/a |
| JJMG01000143.1; | | | | | |
| 23; 24; 21/22 | | | | | |
| 13; 657284919; | 1988 | 3570 | 4347 | n/a | n/a |
| JJMG01000143.1; | | | | | |
| 25; 26; 21/22 | | | | | |
| 14; 663380895; | n/a | 3091 | 4259 | n/a | n/a |
| NZ_JNZW01000001.1; | | | | | |
| 27; 28; 21/22 | | | | | |
| 15; 485035557; | 1566 | 3438 | n/a | n/a | n/a |
| NZ_AECN01000315.1; | | | | | |
| 29; 30; 28/29 | | | | | |
| 16; 485035557; | 1566 | 2971 | n/a | n/a | n/a |
| NZ_AECN01000315.1; | | | | | |
| 31; 32; 28/29 | | | | | |
| 17; 485035557; | 1566 | 2981 | n/a | n/a | n/a |
| NZ_AECN01000315.1; | | | | | |
| 33; 34; 28/29 | | | | | |
| 18; 485035557; | 1565 | 2970 | n/a | n/a | n/a |
| NZ_AECN01000315.1; | | | | | |
| 35; 36; 28/29 | | | | | |
| 19; 485035557; | 1318 | 2339 | n/a | n/a | n/a |
| NZ_AECN01000315.1; | | | | | |
| 37; 38; 28/29 | | | | | |
| 20; 485035557; | 1644 | 2772 | n/a | n/a | n/a |
| NZ_AECN01000315.1; | | | | | |
| 39; 40; 28/29 | | | | | |
| 21; 485035557; | 1533 | 3393 | n/a | n/a | n/a |
| NZ_AECN01000315.1; | | | | | |
| 41; 42; 28/29 | | | | | |
| 22; 485035557; | 1399 | 2451 | n/a | n/a | n/a |
| NZ_AECN01000315.1; | | | | | |
| 43; 44; 28/29 | | | | | |
| 23; 149147045; | 1571 | 3436 | n/a | n/a | n/a |
| NZ_ABBG01000168.1; | | | | | |
| 45; 46; 28/29 | | | | | |
| 24; 67639376; | 1525 | 3349 | n/a | n/a | n/a |
| NZ_AAHO01000116.1; | | | | | |
| 47; 48; 28/29 | | | | | |
| 25; 149147045; | 1570 | 3300 | n/a | n/a | n/a |
| NZ_ABBG01000168.1; | | | | | |
| 49; 50; 28/29 | | | | | |
| 26; 67639376; | 1523 | 2613 | n/a | n/a | n/a |
| NZ_AAHO01000116.1; | | | | | |
| 51; 52; 28/29 | | | | | |
| 27; 67639376; | 1525 | 3292 | n/a | n/a | n/a |
| NZ_AAHO01000116.1; | | | | | |
| 53; 54; 28/29 | | | | | |
| 28; 67639376; | 1523 | 3283 | n/a | n/a | n/a |
| NZ_AAHO01000116.1; | | | | | |
| 55; 56; 28/29 | | | | | |
| 29; 67639376; | 1526 | 3287 | n/a | n/a | n/a |
| NZ_AAHO01000116.1; | | | | | |
| 57; 58; 28/29 | | | | | |
| 30; 67639376; | 1525 | 2612 | n/a | n/a | n/a |
| NZ_AAHO01000116.1; | | | | | |
| 59; 60; 28/29 | | | | | |
| 31; 67639376; | 1525 | 3280 | n/a | n/a | n/a |
| NZ_AAHO01000116.1; | | | | | |
| 61; 62; 28/29 | | | | | |
| 32; 67639376; | 1526 | 3350 | n/a | n/a | n/a |
| NZ_AAHO01000116.1; | | | | | |
| 63; 64; 28/29 | | | | | |
| 33; 67639376; | 1525 | 3295 | n/a | n/a | n/a |
| NZ_AAHO01000116.1; | | | | | |
| 65; 66; 28/29 | | | | | |
| 34; 67639376; | 1525 | 3285 | n/a | n/a | n/a |
| NZ_AAHO01000116.1; | | | | | |
| 67; 68; 28/29 | | | | | |
| 35; 67639376; | 1523 | 3298 | n/a | n/a | n/a |
| NZ_AAHO01000116.1; | | | | | |
| 69; 70; 28/29 | | | | | |
| 36; 67639376; | 1526 | 3296 | n/a | n/a | n/a |
| NZ_AAHO01000116.1; | | | | | |
| 71; 72; 28/29 | | | | | |
| 37; 67639376; | 1525 | 3544 | n/a | n/a | n/a |
| NZ_AAHO01000116.1; | | | | | |
| 73; 74; 28/29 | | | | | |
| 38; 67639376; | 1526 | 3545 | n/a | n/a | n/a |
| NZ_AAHO01000116.1; | | | | | |
| 75; 76; 28/29 | | | | | |
| 39; 67639376; | 1524 | 2611 | n/a | n/a | n/a |
| NZ_AAHO01000116.1; | | | | | |
| 77; 78; 28/29 | | | | | |
| 40; 67639376; | 1523 | 2614 | n/a | n/a | n/a |
| NZ_AAHO01000116.1; | | | | | |
| 79; 80; 28/29 | | | | | |
| 41; 67639376; | 1526 | 3352 | n/a | n/a | n/a |
| NZ_AAHO01000116.1; | | | | | |
| 81; 82; 28/29 | | | | | |
| 42; 67639376; | 1525 | 3297 | n/a | n/a | n/a |
| NZ_AAHO01000116.1; | | | | | |
| 83; 84; 28/29 | | | | | |
| 43; 67639376; | 1525 | 3290 | n/a | n/a | n/a |
| NZ_AAHO01000116.1; | | | | | |
| 85; 86; 28/29 | | | | | |
| 44; 67639376; | 1396 | 2448 | n/a | n/a | n/a |
| NZ_AAHO01000116.1; | | | | | |
| 87; 88; 28/29 | | | | | |
| 45; 67639376; | 1523 | 3409 | n/a | n/a | n/a |
| NZ_AAHO01000116.1; | | | | | |
| 89; 90; 28/29 | | | | | |
| 46; 67639376; | 1525 | 3293 | n/a | n/a | n/a |
| NZ_AAHO01000116.1; | | | | | |
| 91; 92; 28/29 | | | | | |
| 47; 67639376; | 1526 | 3392 | n/a | n/a | n/a |
| NZ_AAHO01000116.1; | | | | | |
| 93; 94; 28/29 | | | | | |
| 48; 67639376; | 1525 | 3291 | n/a | n/a | n/a |
| NZ_AAHO01000116.1; | | | | | |
| 95; 96; 28/29 | | | | | |
| 49; 67639376; | 1525 | 2951 | n/a | n/a | n/a |
| NZ_AAHO01000116.1; | | | | | |
| 97; 98; 28/29 | | | | | |
| 50; 67639376; | 1525 | 3440 | n/a | n/a | n/a |
| NZ_AAHO01000116.1; | | | | | |
| 99; 100; 28/29 | | | | | |
| 51; 67639376; | 1997 | 3282 | n/a | n/a | n/a |
| NZ_AAHO01000116.1; | | | | | |
| 101; 102; 28/29 | | | | | |
| 52; 67639376; | 1526 | 2615 | n/a | n/a | n/a |
| NZ_AAHO01000116.1; | | | | | |
| 103; 104; 28/29 | | | | | |
| 53; 67639376; | 1395 | 2447 | n/a | n/a | n/a |
| NZ_AAHO01000116.1; | | | | | |
| 105; 106; 28/29 | | | | | |
| 54; 67639376; | 1523 | 2610 | n/a | n/a | n/a |
| NZ_AAHO01000116.1; | | | | | |
| 107; 108; 28/29 | | | | | |
| 55; 67639376; | 1523 | 3437 | n/a | n/a | n/a |
| NZ_AAHO01000116.1; | | | | | |
| 109; 110; 28/29 | | | | | |
| 56; 67639376; | 1526 | 3289 | n/a | n/a | n/a |
| NZ_AAHO01000116.1; | | | | | |
| 111; 112; 28/29 | | | | | |
| 57; 67639376; | 1523 | 3351 | n/a | n/a | n/a |
| NZ_AAHO01000116.1; | | | | | |
| 113; 114; 28/29 | | | | | |
| 58; 67639376; | 1525 | 3294 | n/a | n/a | n/a |
| NZ_AAHO01000116.1; | | | | | |
| 115; 116; 28/29 | | | | | |
| 59; 67639376; | 1526 | 3281 | n/a | n/a | n/a |
| NZ_AAHO01000116.1; | | | | | |
| 117; 118; 28/29 | | | | | |
| 60; 67639376; | 1317 | 2338 | n/a | n/a | n/a |
| NZ_AAHO01000116.1; | | | | | |
| 119; 120; 28/29 | | | | | |
| 61; 67639376; | 1525 | 3286 | n/a | n/a | n/a |
| NZ_AAHO01000116.1; | | | | | |
| 121; 122; 28/29 | | | | | |
| 62; 67639376; | 1526 | 2690 | n/a | n/a | n/a |
| NZ_AAHO01000116.1; | | | | | |
| 123; 124; 28/29 | | | | | |
| 63; 67639376; | 1447 | 2509 | n/a | n/a | n/a |
| NZ_AAHO01000116.1; | | | | | |
| 125; 126; 28/29 | | | | | |
| 64; 67639376; | 1404 | 2458 | n/a | n/a | n/a |
| NZ_AAHO01000116.1; | | | | | |
| 127; 128; 28/29 | | | | | |
| 65; 67639376; | 1526 | 3284 | n/a | n/a | n/a |
| NZ_AAHO01000116.1; | | | | | |
| 129; 130; 28/29 | | | | | |
| 66; 67639376; | n/a | 2511 | n/a | n/a | n/a |
| NZ_AAHO01000116.1; | | | | | |
| 131; 132; 28/29 | | | | | |
| 67; 67639376; | 1523 | 3383 | n/a | n/a | n/a |
| NZ_AAHO01000116.1; | | | | | |
| 133; 134; 28/29 | | | | | |
| 68; 740958729; | 1998 | 3288 | n/a | n/a | n/a |
| NZ_JPWT01000001.1; | | | | | |
| 135; 136; 28/29 | | | | | |
| 69; 485035557; | 1348 | 2380 | n/a | n/a | n/a |
| NZ_AECN01000315.1; | | | | | |
| 137; 138; 28/29 | | | | | |
| 70; 67639376; | 1520 | 2606 | n/a | n/a | n/a |
| NZ_AAHO01000116.1; | | | | | |
| 139; 140; 28/29 | | | | | |
| 71; 149147045; | 1571 | 2982 | n/a | n/a | n/a |
| NZ_ABBG01000168.1; | | | | | |
| 141; 142; 28/29 | | | | | |
| 72; 149147045; | 1570 | 3299 | n/a | n/a | n/a |
| NZ_ABBG01000168.1; | | | | | |
| 143; 144; 28/29 | | | | | |
| 73; 657295264; | n/a | 3465 | 4235 | n/a | n/a |
| NZ_AZSD01000040.1; | | | | | |
| 145; 146; 25/26 | | | | | |
| 74; 754788309; | 1695 | 2846 | 4184 | n/a | n/a |
| NZ_BBNO01000002.1; | | | | | |
| 147; 148; 29/30 | | | | | |
| 75; 928897585; | 2094 | 3458 | 4440 | n/a | n/a |
| NZ_LGKG01000196.1; | | | | | |
| 149; 150; 29/30 | | | | | |
| 76; 928897585; | 2271 | 3671 | 4537 | n/a | n/a |
| NZ_LGKG01000196.1; | | | | | |
| 151; 152; 29/30 | | | | | |
| 77; 754788309; | 2039 | 3370 | 4393 | n/a | n/a |
| NZ_BBNO01000002.1; | | | | | |
| 153; 154; 29/30 | | | | | |
| 78; 739918964; | 1901 | 3267 | 4494 | n/a | n/a |
| NZ_JJOH01000097.1; | | | | | |
| 155; 156; 29/30 | | | | | |
| 79; 928897585; | 1354 | 2386 | 3791 | n/a | n/a |
| NZ_LGKG01000196.1; | | | | | |
| 157; 158; 29/30 | | | | | |
| 80; 374982757; | 2058 | 3397 | 4029 | n/a | n/a |
| NC_016582.1; | | | | | |
| 159; 160; 13/14 | | | | | |
| 81; 374982757; | 2058 | 3397 | 4029 | n/a | n/a |
| NC_016582.1; | | | | | |
| 161; 162; 28/29 | | | | | |
| 82; 739918964; | 1901 | 3583 | 4295 | n/a | n/a |
| NZ_JJOH01000097.1; | | | | | |
| 163; 164; 29/30 | | | | | |
| 83; 852460626; | 1357 | 2392 | 3794 | n/a | n/a |
| CP011799.1; | | | | | |
| 165; 166; 29/30 | | | | | |
| 84; 514918665; | 1661 | 2797 | 4073 | n/a | n/a |
| NZ_AOPZ01000109.1; | | | | | |
| 167; 168; 32/33 | | | | | |
| 85; 396995461; | 2024 | 3338 | 3939 | n/a | n/a |
| AJGV01000085.1; | | | | | |
| 169; 170; 28/29 | | | | | |
| 86; 739830131; | n/a | 3259 | 4351 | n/a | n/a |
| NZ_JOJE01000039.1; | | | | | |
| 171; 172; 32/33 | | | | | |
| 87; 396995461; | 1400 | 2452 | 3833 | n/a | n/a |
| AJGV01000085.1; | | | | | |
| 173; 174; 28/29 | | | | | |
| 88; 374982757; | 1332 | 2357 | 3767 | n/a | 3768 |
| NC_016582.1; | | | | | |
| 175; 176; 13/14 | | | | | |
| 89; 374982757; | 1332 | 2357 | 3767 | n/a | 3768 |
| NC_016582.1; | | | | | |
| 177; 178; 28/29 | | | | | |
| 90; 664481891; | 2144 | 3121 | 4289 | n/a | n/a |
| NZ_JOJI01000011.1; | | | | | |
| 179; 180; 27/28 | | | | | |
| 91; 663732121; | n/a | 3094 | 4498 | n/a | n/a |
| NZ_JNZQ01000012.1; | | | | | |
| 181; 182; 22/23 | | | | | |
| 92; 742921760; | 1492 | 2571 | n/a | n/a | n/a |
| NZ_JWKL01000093.1; | | | | | |
| 183; 184; 37/38 | | | | | |
| 93; 742921760; | 1492 | 3303 | n/a | n/a | n/a |
| NZ_JWKL01000093.1; | | | | | |
| 185; 186; 37/38 | | | | | |
| 94; 389809081; | 2150 | 3328 | n/a | n/a | n/a |
| NZ_AJXW01000057.1; | | | | | |
| 187; 188; 26/27 | | | | | |
| 95; 389809081; | 1398 | 2450 | n/a | n/a | n/a |
| NZ_AJXW01000057.1; | | | | | |
| 189; 190; 26/27 | | | | | |
| 96; 655566937; | 1830 | 3056 | n/a | n/a | n/a |
| NZ_JAES01000046.1; | | | | | |
| 191; 192; 26/27 | | | | | |
| 97; 749673329; | 2020 | 3333 | 4374 | n/a | n/a |
| NZ_JROO01000009.1; | | | | | |
| 193; 194; 20/21 | | | | | |
| 98; 755108320; | 2046 | 3378 | 4399 | n/a | n/a |
| NZ_BBPN01000056.1; | | | | | |
| 195; 196; 16/17 | | | | | |
| 99; 755108320; | 2049 | 3380 | 4402 | n/a | n/a |
| NZ_BBPN01000056.1; | | | | | |
| 197; 198; 16/17 | | | | | |
| 100; 755077919; | 2047 | 3612 | 4400 | n/a | n/a |
| NZ_BBPQ01000048.1; | | | | | |
| 199; 200; 16/17 | | | | | |
| 101; 755077919; | 2048 | 3613 | 4401 | n/a | n/a |
| NZ_BBPQ01000048.1; | | | | | |
| 201; 202; 16/17 | | | | | |
| 102; 167643973; | 2136 | 2697 | n/a | n/a | n/a |
| NC_010338.1; | | | | | |
| 203; 204; 19/20 | | | | | |
| 103; 167643973; | 2136 | 2697 | n/a | n/a | n/a |
| NC_010338.1; | | | | | |
| 205; 206; 19/20 | | | | | |
| 104; 646523831; | 1607 | 2708 | n/a | n/a | n/a |
| NZ_BATN01000047.1; | | | | | |
| 207; 208; 18/19 | | | | | |
| 105; 646523831; | 2231 | 3420 | n/a | n/a | n/a |
| NZ_BATN01000047.1; | | | | | |
| 209; 210; 18/19 | | | | | |
| 106; 739598481; | 2190 | 3237 | n/a | n/a | n/a |
| NZ_JFHR01000062.1; | | | | | |
| 211; 212; 18/19 | | | | | |
| 107; 739598481; | 2190 | 3237 | n/a | n/a | n/a |
| NZ_JFHR01000062.1; | | | | | |
| 213; 214; 18/19 | | | | | |
| 108; 484272664; | 2203 | 3239 | n/a | n/a | n/a |
| NZ_AKIB01000015.1; | | | | | |
| 215; 216; 18/19 | | | | | |
| 109; 484272664; | 1666 | 2805 | n/a | n/a | n/a |
| NZ_AKIB01000015.1; | | | | | |
| 217; 218; 18/19 | | | | | |
| 110; 646523831; | 2241 | 2972 | n/a | n/a | n/a |
| NZ_BATN01000047.1; | | | | | |
| 219; 220; 18/19 | | | | | |
| 111; 312794749; | 2033 | 2722 | n/a | n/a | n/a |
| NC_014722.1; | | | | | |
| 221; 222; 10/11 | | | | | |
| 112; 312794749; | n/a | 2721 | n/a | n/a | n/a |
| NC_014722.1; | | | | | |
| 223; 224; 25/26 | | | | | |
| 113; 652527059; | n/a | 3434 | n/a | n/a | n/a |
| NZ_KE384226.1; | | | | | |
| 225; 226; 27/28 | | | | | |
| 114; 652527059; | n/a | 3007 | n/a | n/a | n/a |
| NZ_KE384226.1; | | | | | |
| 227; 228; 27/28 | | | | | |
| 115; 652527059; | 1790 | 3006 | n/a | n/a | n/a |
| NZ_KE384226.1; | | | | | |
| 229; 230; 28/29 | | | | | |
| 116; 652527059; | 1790 | 3006 | n/a | n/a | n/a |
| NZ_KE384226.1; | | | | | |
| 231; 232; 29/30 | | | | | |
| 117; 652527059; | 1790 | 3006 | n/a | n/a | n/a |
| NZ_KE384226.1; | | | | | |
| 233; 234; 28/29 | | | | | |
| 118; 483624586; | n/a | 2883 | n/a | n/a | n/a |
| NZ_KB889561.1; | | | | | |
| 235; 236; 23/24 | | | | | |
| 119; 221717172; | 1425 | 2481 | 3856 | n/a | n/a |
| DS999644.1; | | | | | |
| 237; 238; 27/28 | | | | | |
| 120; 221717172; | 1569 | 3148 | 3935 | n/a | n/a |
| DS999644.1; | | | | | |
| 239; 240; 27/28 | | | | | |
| 121; 221717172; | 1917 | 3526 | 3935 | n/a | n/a |
| DS999644.1; | | | | | |
| 241; 242; 27/28 | | | | | |
| 122; 221717172; | 1918 | 3536 | 3935 | n/a | n/a |
| DS999644.1; | | | | | |
| 243; 244; 27/28 | | | | | |
| 123; 664184565; | 1443 | 2505 | 3864 | n/a | n/a |
| NZ_JOGA01000019.1; | | | | | |
| 245; 246; 27/28 | | | | | |
| 124; 664184565; | 1919 | 3151 | 4305 | n/a | n/a |
| NZ_JOGA01000019.1; | | | | | |
| 247; 248; 27/28 | | | | | |
| 125; 764464761; | 1568 | 3140 | 3965 | n/a | n/a |
| NZ_JYBE01000113.1; | | | | | |
| 249; 250; 27/28 | | | | | |
| 126; 664184565; | 1882 | 3146 | 3965 | n/a | n/a |
| NZ_JOGA01000019.1; | | | | | |
| 251; 252; 27/28 | | | | | |
| 127; 764464761; | 1890 | 3156 | 3965 | n/a | n/a |
| NZ_JYBE01000113.1; | | | | | |
| 253; 254; 27/28 | | | | | |
| 128; 764464761; | 1452 | 2516 | 3867 | n/a | n/a |
| NZ_JYBE01000113.1; | | | | | |
| 255; 256; 27/28 | | | | | |
| 129; 764464761; | 1890 | 3411 | 3965 | n/a | n/a |
| NZ_JYBE01000113.1; | | | | | |
| 257; 258; 27/28 | | | | | |
| 130; 664051798; | 1873 | 3145 | 4269 | n/a | n/a |
| NZ_JNZK01000024.1; | | | | | |
| 259; 260; 27/28 | | | | | |
| 131; 664095100; | 1859 | 3154 | 4248 | n/a | n/a |
| NZ_JOED01000028.1; | | | | | |
| 261; 262; 24/25 | | | | | |
| 132; 664095100; | 1859 | 3147 | 4248 | n/a | n/a |
| NZ_JOED01000028.1; | | | | | |
| 263; 264; 24/25 | | | | | |
| 133; 664095100; | 1852 | 3531 | 4292 | n/a | n/a |
| NZ_JOED01000028.1; | | | | | |
| 265; 266; 24/25 | | | | | |
| 134; 664095100; | 1852 | 3123 | 4248 | n/a | n/a |
| NZ_JOED01000028.1; | | | | | |
| 267; 268; 24/25 | | | | | |
| 135; 664095100; | 1852 | 3649 | 4248 | n/a | n/a |
| NZ_JOED01000028.1; | | | | | |
| 269; 270; 24/25 | | | | | |
| 136; 664095100; | 1852 | 3144 | 4248 | n/a | n/a |
| NZ_JOED01000028.1; | | | | | |
| 271; 272; 24/25 | | | | | |
| 137; 664095100; | 1852 | 3141 | 4248 | n/a | n/a |
| NZ_JOED01000028.1; | | | | | |
| 273; 274; 24/25 | | | | | |
| 138; 664095100; | 1852 | 3534 | 4248 | n/a | n/a |
| NZ_JOED01000028.1; | | | | | |
| 275; 276; 24/25 | | | | | |
| 139; 664095100; | 1859 | 3530 | 4248 | n/a | n/a |
| NZ_JOED01000028.1; | | | | | |
| 277; 278; 24/25 | | | | | |
| 140; 664095100; | 1883 | 3527 | 4276 | n/a | n/a |
| NZ_JOED01000028.1; | | | | | |
| 279; 280; 24/25 | | | | | |
| 141; 664095100; | 1852 | 3391 | 4248 | n/a | n/a |
| NZ_JOED01000028.1; | | | | | |
| 281; 282; 24/25 | | | | | |
| 142; 664095100; | 1852 | 3528 | 4248 | n/a | n/a |
| NZ_JOED01000028.1; | | | | | |
| 283; 284; 24/25 | | | | | |
| 143; 484070161; | 1708 | 2862 | 4109 | n/a | n/a |
| NZ_KB898999.1; | | | | | |
| 285; 286; 24/25 | | | | | |
| 144; 664095100; | 1852 | 3529 | 4248 | n/a | n/a |
| NZ_JOED01000028.1; | | | | | |
| 287; 288; 24/25 | | | | | |
| 145; 664095100; | 1883 | 3651 | 4276 | n/a | n/a |
| NZ_JOED01000028.1; | | | | | |
| 289; 290; 24/25 | | | | | |
| 146; 664095100; | 1878 | 3152 | 4247 | n/a | n/a |
| NZ_JOED01000028.1; | | | | | |
| 291; 292; 24/25 | | | | | |
| 147; 664095100; | 1851 | 3153 | 4247 | n/a | n/a |
| NZ_JOED01000028.1; | | | | | |
| 293; 294; 24/25 | | | | | |
| 148; 664049400; | 1872 | 3176 | 4268 | n/a | n/a |
| NZ_JOEZ01000021.1; | | | | | |
| 295; 296; 24/25 | | | | | |
| 149; 695845602; | 1343 | 2375 | 3782 | n/a | n/a |
| NZ_JNWU01000018.1; | | | | | |
| 297; 298; 24/25 | | | | | |
| 150; 695845602; | 1645 | 3404 | 4413 | n/a | n/a |
| NZ_JNWU01000018.1; | | | | | |
| 299; 300; 24/25 | | | | | |
| 151; 695845602; | 1916 | 3143 | 4304 | n/a | n/a |
| NZ_JNWU01000018.1; | | | | | |
| 301; 302; 24/25 | | | | | |
| 152; 943927948; | 1902 | 3150 | 4296 | n/a | n/a |
| NZ_LIQV01000315.1; | | | | | |
| 303; 304; 24/25 | | | | | |
| 153; 654969845; | 2256 | 3647 | 4119 | n/a | n/a |
| NZ_ARPF01000020.1; | | | | | |
| 305; 306; 16/17 | | | | | |
| 154; 664095100; | 1869 | 3149 | 4265 | n/a | n/a |
| NZ_JOED01000028.1; | | | | | |
| 307; 308; 24/25 | | | | | |
| 155; 664021017; | 1869 | 3149 | 4265 | n/a | n/a |
| NZ_JOEM01000009.1; | | | | | |
| 309; 310; 26/27 | | | | | |
| 156; 664095100; | 1702 | 2856 | 4108 | n/a | n/a |
| NZ_JOED01000028.1; | | | | | |
| 311; 312; 24/25 | | | | | |
| 157; 654969845; | 1701 | 2855 | 4107 | n/a | n/a |
| NZ_ARPF01000020.1; | | | | | |
| 313; 314; 16/17 | | | | | |
| 158; 654969845; | 1821 | 3142 | 4119 | n/a | n/a |
| NZ_ARPF01000020.1; | | | | | |
| 315; 316; 16/17 | | | | | |
| 159; 221717172; | 1391 | 2441 | 3829 | n/a | n/a |
| DS999644.1; | | | | | |
| 317; 318; 27/28 | | | | | |
| 160; 315497051; | 1334 | 2360 | n/a | n/a | n/a |
| NC_014816.1; | | | | | |
| 319; 320; 28/29 | | | | | |
| 161; 315497051; | 1612 | 3364 | n/a | n/a | n/a |
| NC_014816.1; | | | | | |
| 321; 322; 28/29 | | | | | |
| 162; 380356103; | 1368 | 2406 | 3803 | n/a | n/a |
| AB593691.1; | | | | | |
| 323; 324; 26/27 | | | | | |
| 163; 383755859; | 1369 | 2407 | n/a | n/a | n/a |
| NC_017075.1; | | | | | |
| 325; 326; 20/21 | | | | | |
| 164; 383755859; | 1630 | 3401 | n/a | n/a | n/a |
| NC_017075.1; | | | | | |
| 327; 328; 20/21 | | | | | |
| 165; 381171950; | 2146 | 2596 | n/a | n/a | n/a |
| NZ_CAHO01000029.1; | | | | | |
| 329; 330; 29/30 | | | | | |
| 166; 325923334; | 1534 | 2622 | n/a | n/a | n/a |
| NZ_AEQX01000392.1; | | | | | |
| 331; 332; 26/27 | | | | | |
| 167; 325923334; | 1534 | 2622 | n/a | n/a | n/a |
| NZ_AEQX01000392.1; | | | | | |
| 333; 334; 28/29 | | | | | |
| 168; 565808720; | 2065 | 2946 | n/a | n/a | n/a |
| NZ_CM002307.1; | | | | | |
| 335; 336; 26/27 | | | | | |
| 169; 565808720; | 2065 | 2946 | n/a | n/a | n/a |
| NZ_CM002307.1; | | | | | |
| 337; 338; 28/29 | | | | | |
| 170; 825139250; | 2099 | 3467 | n/a | n/a | n/a |
| NZ_JZEH01000001.1; | | | | | |
| 339; 340; 26/27 | | | | | |
| 171; 325923334; | 2099 | 3467 | n/a | n/a | n/a |
| NZ_AEQX01000392.1; | | | | | |
| 341; 342; 28/29 | | | | | |
| 172; 507418017; | 2008 | 3314 | n/a | n/a | n/a |
| NZ_APMC02000050.1; | | | | | |
| 343; 344; 26/27 | | | | | |
| 173; 746486416; | 2008 | 3314 | n/a | n/a | n/a |
| NZ_KL638873.1; | | | | | |
| 345; 346; 28/29 | | | | | |
| 174; 746366822; | 2010 | 3316 | n/a | n/a | n/a |
| NZ_JSZF01000067.1; | | | | | |
| 347; 348; 26/27 | | | | | |
| 175; 746366822; | 2010 | 3316 | n/a | n/a | n/a |
| NZ_JSZF01000067.1; | | | | | |
| 349; 350; 28/29 | | | | | |
| 176; 825156557; | 2100 | 3468 | n/a | n/a | n/a |
| NZ_JZEI01000001.1; | | | | | |
| 351; 352; 25/26 | | | | | |
| 177; 920684790; | 2100 | 3468 | n/a | n/a | n/a |
| NZ_LHBW01000046.1; | | | | | |
| 353; 354; 28/29 | | | | | |
| 178; 507418017; | 2091 | 3451 | n/a | n/a | n/a |
| NZ_APMC02000050.1; | | | | | |
| 355; 356; 26/27 | | | | | |
| 179; 810489403; | 2091 | 3451 | n/a | n/a | n/a |
| NZ_CP011256.1; | | | | | |
| 357; 358; 28/29 | | | | | |
| 180; 746366822; | 2006 | 3312 | n/a | n/a | n/a |
| NZ_JSZF01000067.1; | | | | | |
| 359; 360; 26/27 | | | | | |
| 181; 746366822; | 2006 | 3312 | n/a | n/a | n/a |
| NZ_JSZF01000067.1; | | | | | |
| 361; 362; 28/29 | | | | | |
| 182; 507418017; | 2007 | 3313 | n/a | n/a | n/a |
| NZ_APMC02000050.1; | | | | | |
| 363; 364; 26/27 | | | | | |
| 183; 507418017; | 2007 | 3313 | n/a | n/a | n/a |
| NZ_APMC02000050.1; | | | | | |
| 365; 366; 28/29 | | | | | |
| 184; 507418017; | 1665 | 3323 | n/a | n/a | n/a |
| NZ_APMC02000050.1; | | | | | |
| 367; 368; 26/27 | | | | | |
| 185; 507418017; | 1665 | 3323 | n/a | n/a | n/a |
| NZ_APMC02000050.1; | | | | | |
| 369; 370; 28/29 | | | | | |
| 186; 507418017; | 2007 | 3386 | n/a | n/a | n/a |
| NZ_APMC02000050.1; | | | | | |
| 371; 372; 26/27 | | | | | |
| 187; 507418017; | 2007 | 3386 | n/a | n/a | n/a |
| NZ_APMC02000050.1; | | | | | |
| 373; 374; 28/29 | | | | | |
| 188; 746494072; | 2009 | 3315 | n/a | n/a | n/a |
| NZ_KL638866.1; | | | | | |
| 375; 376; 26/27 | | | | | |
| 189; 507418017; | 2009 | 3315 | n/a | n/a | n/a |
| NZ_APMC02000050.1; | | | | | |
| 377; 378; 28/29 | | | | | |
| 190; 507418017; | 1665 | 2804 | n/a | n/a | n/a |
| NZ_APMC02000050.1; | | | | | |
| 379; 380; 26/27 | | | | | |
| 191; 507418017; | 1665 | 2804 | n/a | n/a | n/a |
| NZ_APMC02000050.1; | | | | | |
| 381; 382; 28/29 | | | | | |
| 192; 507418017; | 2245 | 3633 | n/a | n/a | n/a |
| NZ_APMC02000050.1; | | | | | |
| 383; 384; 26/27 | | | | | |
| 193; 920684790; | 2245 | 3633 | n/a | n/a | n/a |
| NZ_LHBW01000046.1; | | | | | |
| 385; 386; 28/29 | | | | | |
| 194; 941965142; | 1477 | 2551 | n/a | n/a | n/a |
| NZ_LKIT01000002.1; | | | | | |
| 387; 388; 26/27 | | | | | |
| 195; 941965142; | 1477 | 2551 | n/a | n/a | n/a |
| NZ_LKIT01000002.1; | | | | | |
| 389; 390; 29/30 | | | | | |
| 196; 893711378; | 1574 | 2663 | n/a | n/a | n/a |
| NZ_KQ236029.1; | | | | | |
| 391; 392; 23/24 | | | | | |
| 197; 893711378; | 2125 | 3501 | n/a | n/a | n/a |
| NZ_KQ236029.1; | | | | | |
| 393; 394; 23/24 | | | | | |
| 198; 893711378; | 1676 | 2818 | n/a | n/a | n/a |
| NZ_KQ236029.1; | | | | | |
| 395; 396; 23/24 | | | | | |
| 199; 763092879; | 2066 | 3403 | n/a | n/a | n/a |
| NZ_JXZE01000003.1; | | | | | |
| 397; 398; 23/24 | | | | | |
| 200; 103485498; | 1320 | 2342 | n/a | n/a | n/a |
| NC_008048.1; | | | | | |
| 399; 400; 18/19 | | | | | |
| 201; 103485498; | 1320 | 2342 | n/a | n/a | n/a |
| NC_008048.1; | | | | | |
| 401; 402; 21/22 | | | | | |
| 202; 103485498; | 2134 | 3357 | n/a | n/a | n/a |
| NC_008048.1; | | | | | |
| 403; 404; 18/19 | | | | | |
| 203; 103485498; | 2134 | 3357 | n/a | n/a | n/a |
| NC_008048.1; | | | | | |
| 405; 406; 21/22 | | | | | |
| 204; 924898949; | 1361 | 2396 | n/a | n/a | n/a |
| NZ_CP009452.1; | | | | | |
| 407; 408; 21/22 | | | | | |
| 205; 738613868; | 1964 | 3217 | n/a | n/a | n/a |
| NZ_JFYZ01000002.1; | | | | | |
| 409; 410; 21/22 | | | | | |
| 206; 834156795; | n/a | 2497 | n/a | n/a | n/a |
| BBRO01000001.1; | | | | | |
| 411; 412; 12/13 | | | | | |
| 207; 834156795; | n/a | 2506 | n/a | n/a | n/a |
| BBRO01000001.1; | | | | | |
| 413; 414; 12/13 | | | | | |
| 208; 834156795; | 1985 | 3251 | n/a | n/a | n/a |
| BBRO01000001.1; | | | | | |
| 415; 416; 12/13 | | | | | |
| 209; 924898949; | 2255 | 3646 | n/a | n/a | n/a |
| NZ_CP009452.1; | | | | | |
| 417; 418; 21/22 | | | | | |
| 210; 937372567; | 2281 | 3689 | n/a | n/a | n/a |
| NZ_CP012700.1; | | | | | |
| 419; 420; 20/21 | | | | | |
| 211; 834156795; | 1434 | 2495 | n/a | n/a | n/a |
| BBRO01000001.1; | | | | | |
| 421; 422; 21/22 | | | | | |
| 212; 834156795; | 1434 | 2495 | n/a | n/a | n/a |
| BBRO01000001.1; | | | | | |
| 423; 424; 12/13 | | | | | |
| 213; 103485498; | 1321 | 2343 | n/a | n/a | n/a |
| NC_008048.1; | | | | | |
| 425; 426; 21/22 | | | | | |
| 214; 103485498; | 2028 | 3358 | n/a | n/a | n/a |
| NC_008048.1; | | | | | |
| 427; 428; 21/22 | | | | | |
| 215; 167621728; | 1597 | 2696 | n/a | n/a | n/a |
| NC_010335.1; | | | | | |
| 429; 430; 23/24 | | | | | |
| 216; 167621728; | 1597 | 2696 | n/a | n/a | n/a |
| NC_010335.1; | | | | | |
| 431; 432; 23/24 | | | | | |
| 217; 167621728; | 1597 | 2696 | n/a | n/a | n/a |
| NC_010335.1; | | | | | |
| 433; 434; 23/24 | | | | | |
| 218; 196476886; | 1326 | 2351 | n/a | n/a | n/a |
| CP000747.1; | | | | | |
| 435; 436; 16/17 | | | | | |
| 219; 295429362; | 1331 | 2356 | n/a | n/a | n/a |
| CP002008.1; | | | | | |
| 437; 438; 21/22 | | | | | |
| 220; 295429362; | 1331 | 2356 | n/a | n/a | n/a |
| CP002008.1; | | | | | |
| 439; 440; 18/19 | | | | | |
| 221; 295429362; | 1331 | 2356 | n/a | n/a | n/a |
| CP002008.1; | | | | | |
| 441; 442; 23/24 | | | | | |
| 222; 654573246; | 1817 | 3554 | n/a | n/a | n/a |
| NZ_AUEO01000025.1; | | | | | |
| 443; 444; 21/22 | | | | | |
| 223; 654573246; | 1817 | 3554 | n/a | n/a | n/a |
| NZ_AUEO01000025.1; | | | | | |
| 445; 446; 18/19 | | | | | |
| 224; 654573246; | 1817 | 3554 | n/a | n/a | n/a |
| NZ_AUEO01000025.1; | | | | | |
| 447; 448; 41/42 | | | | | |
| 225; 297196766; | 1389 | 2437 | 3825 | n/a | n/a |
| NZ_CM000951.1; | | | | | |
| 449; 450; 24/25 | | | | | |
| 226; 297196766; | n/a | 3543 | 3944 | n/a | n/a |
| NZ_CM000951.1; | | | | | |
| 451; 452; 24/25 | | | | | |
| 227; 754819815; | 1378 | 2424 | 3817 | n/a | n/a |
| NZ_CDME01000002.1; | | | | | |
| 453; 454; 24/25 | | | | | |
| 228; 754819815; | 1378 | 2424 | 3817 | n/a | n/a |
| NZ_CDME01000002.1; | | | | | |
| 455; 456; 24/25 | | | | | |
| 229; 754819815; | 2042 | 3615 | 4396 | n/a | n/a |
| NZ_CDME01000002.1; | | | | | |
| 457; 458; 24/25 | | | | | |
| 230; 754819815; | 2042 | 3615 | 4396 | n/a | n/a |
| NZ_CDME01000002.1; | | | | | |
| 459; 460; 24/25 | | | | | |
| 231; 487385965; | 1719 | 2878 | 4123 | n/a | n/a |
| NZ_KB911613.1; | | | | | |
| 461; 462; 23/24 | | | | | |
| 232; 487385965; | 1719 | 2878 | 4123 | n/a | n/a |
| NZ_KB911613.1; | | | | | |
| 463; 464; 22/23 | | | | | |
| 233; 458977979; | 1403 | 2457 | 3837 | n/a | n/a |
| NZ_AORZ01000024.1; | | | | | |
| 465; 466; 16/17 | | | | | |
| 234; 458977979; | 1528 | 3549 | 3930 | n/a | n/a |
| NZ_AORZ01000024.1; | | | | | |
| 467; 468; 16/17 | | | | | |
| 235; 825314728; | 2239 | 3470 | n/a | n/a | n/a |
| NZ_LASZ01000003.1; | | | | | |
| 469; 470; 26/27 | | | | | |
| 236; 483972948; | 1704 | 2858 | 4185 | n/a | n/a |
| NZ_KB891808.1; | | | | | |
| 471; 472; 28/29 | | | | | |
| 237; 937505789; | 1476 | 2550 | n/a | n/a | n/a |
| NZ_LJGM01000026.1; | | | | | |
| 473; 474; 26/27 | | | | | |
| 238; 938883590; | 2283 | 3692 | n/a | n/a | n/a |
| NZ_CP012900.1; | | | | | |
| 475; 476; 25/26 | | | | | |
| 239; 663737675; | 2191 | 3572 | 4263 | n/a | n/a |
| NZ_JOJF01000002.1; | | | | | |
| 477; 478; 29/30 | | | | | |
| 240; 835885587; | 2104 | 3593 | n/a | n/a | n/a |
| NZ_KN265462.1; | | | | | |
| 479; 480; 26/27 | | | | | |
| 241; 825314716; | 2101 | 3469 | n/a | n/a | n/a |
| NZ_LASZ01000002.1; | | | | | |
| 481; 482; 26/27 | | | | | |
| 242; 67639376; | 1449 | 2512 | n/a | n/a | n/a |
| NZ_AAHO01000116.1; | | | | | |
| 483; 484; 28/29 | | | | | |
| 243; 835885587; | 1448 | 2510 | n/a | n/a | n/a |
| NZ_KN265462.1; | | | | | |
| 485; 486; 33/34 | | | | | |
| 244; 433601838; | n/a | 2758 | 4044 | n/a | n/a |
| NC_019673.1; | | | | | |
| 487; 488; 26/27 | | | | | |
| 245; 653330442; | 1812 | 3032 | n/a | n/a | n/a |
| NZ_KE386531.1; | | | | | |
| 489; 490; 26/27 | | | | | |
| 246; 389798210; | 1543 | 2633 | n/a | n/a | n/a |
| NZ_AJXV01000032.1; | | | | | |
| 491; 492; 26/27 | | | | | |
| 247; 469816339; | 1643 | 2769 | n/a | n/a | n/a |
| NC_020541.1; | | | | | |
| 493; 494; 26/27 | | | | | |
| 248; 653308965; | 1809 | 3029 | n/a | n/a | n/a |
| NZ_AXBJ01000026.1; | | | | | |
| 495; 496; 24/25 | | | | | |
| 249; 919546651; | n/a | 3629 | n/a | n/a | n/a |
| NZ_JOEL01000060.1; | | | | | |
| 497; 498; 27/28 | | | | | |
| 250; 653321547; | 1810 | 3030 | n/a | n/a | n/a |
| NZ_ATYF01000013.1; | | | | | |
| 499; 500; 26/27 | | | | | |
| 251; 332527785; | 1564 | 2658 | n/a | n/a | n/a |
| NZ_AEWG01000155.1; | | | | | |
| 501; 502; 20/21 | | | | | |
| 252; 269954810; | 1605 | 3541 | 4000 | n/a | n/a |
| NC_013530.1; | | | | | |
| 503; 504; 20/21 | | | | | |
| 253; 943674269; | 1656 | 3565 | 4070 | n/a | n/a |
| NZ_LIQO01000205.1; | | | | | |
| 505; 506; 21/22 | | | | | |
| 254; 663414324; | 1656 | 2794 | 4070 | n/a | n/a |
| NZ_JOHQ01000068.1; | | | | | |
| 507; 508; 21/22 | | | | | |
| 255; 943674269; | 1656 | 3568 | 4070 | n/a | n/a |
| NZ_LIQO01000205.1; | | | | | |
| 509; 510; 21/22 | | | | | |
| 256; 269954810; | 1328 | 2353 | 3765 | n/a | n/a |
| NC_013530.1; | | | | | |
| 511; 512; 20/21 | | | | | |
| 257; 937505789; | 1760 | 3516 | n/a | n/a | n/a |
| NZ_LJGM01000026.1; | | | | | |
| 513; 514; 26/27 | | | | | |
| 258; 663414324; | 1864 | 3563 | 4070 | n/a | n/a |
| NZ_JOHQ01000068.1; | | | | | |
| 515; 516; 21/22 | | | | | |
| 259; 663414324; | 1656 | 3575 | 4070 | n/a | n/a |
| NZ_JOHQ01000068.1; | | | | | |
| 517; 518; 21/22 | | | | | |
| 260; 389759651; | 1548 | 3229 | n/a | n/a | n/a |
| NZ_AJXS01000437.1; | | | | | |
| 519; 520; 26/27 | | | | | |
| 261; 928998800; | 2274 | 3675 | n/a | n/a | n/a |
| NZ_BBYR01000083.1; | | | | | |
| 521; 522; 16/17 | | | | | |
| 262; 943674269; | 1656 | 3673 | 4070 | n/a | n/a |
| NZ_LIQO01000205.1; | | | | | |
| 523; 524; 21/22 | | | | | |
| 263; 856992287; | 2113 | 3484 | 4458 | n/a | n/a |
| NZ_LFKW01000127.1; | | | | | |
| 525; 526; 20/21 | | | | | |
| 264; 938956730; | 2285 | 3694 | n/a | n/a | n/a |
| NZ_CP009429.1; | | | | | |
| 527; 528; 19/20 | | | | | |
| 265; 563282524; | 1419 | 2474 | n/a | n/a | n/a |
| AYSC01000019.1; | | | | | |
| 529; 530; 22/23 | | | | | |
| 266; 399058618; | 1545 | 2636 | n/a | n/a | n/a |
| NZ_AKKE01000021.1; | | | | | |
| 531; 532; 22/23 | | | | | |
| 267; 937372567; | n/a | 3690 | n/a | n/a | n/a |
| NZ_CP012700.1; | | | | | |
| 533; 534; 19/20 | | | | | |
| 268; 825353621; | 2102 | 3471 | 4445 | n/a | n/a |
| NZ_LAYX01000011.1; | | | | | |
| 535; 536; 21/22 | | | | | |
| 269; 937505789; | 2282 | 3691 | n/a | n/a | n/a |
| NZ_LJGM01000026.1; | | | | | |
| 537; 538; 26/27 | | | | | |
| 270; 739702045; | 1446 | 2508 | n/a | n/a | n/a |
| NZ_JNFC01000030.1; | | | | | |
| 539; 540; 18/19 | | | | | |
| 271; 484867900; | n/a | 3448 | 4110 | n/a | n/a |
| NZ_AGNH01000612.1; | | | | | |
| 541; 542; 15/16 | | | | | |
| 272; 162960844; | 1989 | 3257 | 4349 | n/a | n/a |
| NC_003155.4; | | | | | |
| 543; 544; 23/24 | | | | | |
| 273; 162960844; | n/a | 2403 | 3800 | n/a | n/a |
| NC_003155.4; | | | | | |
| 545; 546; 23/24 | | | | | |
| 274; 399069941; | 1544 | 2635 | n/a | n/a | n/a |
| NZ_AKKF01000033.1; | | | | | |
| 547; 548; 22/23 | | | | | |
| 275; 399069941; | 1544 | 2635 | n/a | n/a | n/a |
| NZ_AKKF01000033.1; | | | | | |
| 549; 550; 22/23 | | | | | |
| 276; 738615271; | 1428 | 2485 | n/a | n/a | n/a |
| NZ_JFYZ01000008.1; | | | | | |
| 551; 552; 22/23 | | | | | |
| 277; 739659070; | 1445 | 2507 | n/a | n/a | n/a |
| NZ_JNFD01000017.1; | | | | | |
| 553; 554; 19/20 | | | | | |
| 278; 749188513; | 2011 | 3317 | n/a | n/a | n/a |
| NZ_CP009122.1; | | | | | |
| 555; 556; 19/20 | | | | | |
| 279; 345007964; | 1624 | 3548 | 4025 | n/a | n/a |
| NC_015957.1; | | | | | |
| 557; 558; 24/25 | | | | | |
| 280; 345007964; | 1624 | 3548 | 4025 | n/a | n/a |
| NC_015957.1; | | | | | |
| 559; 560; 24/25 | | | | | |
| 281; 345007964; | 1337 | 2364 | 3771 | n/a | n/a |
| NC_015957.1; | | | | | |
| 561; 562; 24/25 | | | | | |
| 282; 345007964; | 1337 | 2364 | 3771 | n/a | n/a |
| NC_015957.1; | | | | | |
| 563; 564; 24/25 | | | | | |
| 283; 928998724; | 1436 | 2498 | n/a | n/a | n/a |
| NZ_BBYR01000007.1; | | | | | |
| 565; 566; 19/20 | | | | | |
| 284; 484007841; | n/a | 2822 | 4087 | n/a | n/a |
| NZ_ANAD01000138.1; | | | | | |
| 567; 568; 20/21 | | | | | |
| 285; 162960844; | 1583 | 3256 | 4348 | n/a | n/a |
| NC_003155.4; | | | | | |
| 569; 570; 21/22 | | | | | |
| 286; 162960844; | 1366 | 2404 | 3801 | n/a | n/a |
| NC_003155.4; | | | | | |
| 571; 572; 21/22 | | | | | |
| 287; 662133033; | 1894 | 3271 | 4287 | n/a | n/a |
| NZ_KL570321.1; | | | | | |
| 573; 574; 21/22 | | | | | |
| 288; 662133033; | 1850 | 3494 | 4246 | n/a | n/a |
| NZ_KL570321.1; | | | | | |
| 575; 576; 21/22 | | | | | |
| 289; 487404592; | 1725 | 2886 | 4131 | n/a | n/a |
| NZ_ARVW01000001.1; | | | | | |
| 577; 578; 22/23 | | | | | |
| 290; 739659070; | 2215 | 3245 | n/a | n/a | n/a |
| NZ_JNFD01000017.1; | | | | | |
| 579; 580; 19/20 | | | | | |
| 291; 702808005; | 1925 | 3167 | 4311 | n/a | n/a |
| NZ_JNZA01000041.1; | | | | | |
| 581; 582; 21/22 | | | | | |
| 292; 664277815; | 1889 | 3574 | 4281 | n/a | n/a |
| NZ_JOIX01000041.1; | | | | | |
| 583; 584; 21/22 | | | | | |
| 293; 499136900; | 1972 | 3234 | 4345 | n/a | n/a |
| NZ_ASJB01000015.1; | | | | | |
| 585; 586; 20/21 | | | | | |
| 294; 487404592; | 1725 | 2886 | 4131 | n/a | n/a |
| NZ_ARVW01000001.1; | | | | | |
| 587; 588; 22/23 | | | | | |
| 295; 716912366; | 1928 | 3172 | 4314 | n/a | n/a |
| NZ_JRHJ01000016.1; | | | | | |
| 589; 590; 21/22 | | | | | |
| 296; 381200190; | 1567 | 2660 | 3964 | n/a | n/a |
| NZ_JH164855.1; | | | | | |
| 591; 592; 19/20 | | | | | |
| 297; 663300513; | 1856 | 3255 | 4252 | n/a | n/a |
| NZ_JNZY01000033.1; | | | | | |
| 593; 594; 21/22 | | | | | |
| 298; 822214995; | 1355 | 2388 | 3792 | n/a | n/a |
| NZ_CP007699.1; | | | | | |
| 595; 596; 21/22 | | | | | |
| 299; 664013282; | 1868 | 3261 | 4264 | n/a | n/a |
| NZ_JOAP01000011.1; | | | | | |
| 597; 598; 12/13 | | | | | |
| 300; 822214995; | 2095 | 3460 | 4441 | n/a | n/a |
| NZ_CP007699.1; | | | | | |
| 599; 600; 21/22 | | | | | |
| 301; 514916021; | 1409 | 2463 | 3841 | n/a | n/a |
| NZ_AOPZ01000017.1; | | | | | |
| 601; 602; 21/22 | | | | | |
| 302; 514916021; | 1658 | 3258 | 4071 | n/a | n/a |
| NZ_AOPZ01000017.1; | | | | | |
| 603; 604; 21/22 | | | | | |
| 303; 663421576; | 1865 | 3579 | 4260 | n/a | n/a |
| NZ_JOGE01000134.1; | | | | | |
| 605; 606; 21/22 | | | | | |
| 304; 928897596; | 2272 | 3672 | 4538 | n/a | n/a |
| NZ_LGKG01000207.1; | | | | | |
| 607; 608; 21/22 | | | | | |
| 305; 484007121; | n/a | 2756 | 4042 | n/a | n/a |
| NZ_ANAC01000010.1; | | | | | |
| 609; 610; 29/30 | | | | | |
| 306; 484007121; | 1779 | 3377 | 4042 | n/a | n/a |
| NZ_ANAC01000010.1; | | | | | |
| 611; 612; 29/30 | | | | | |
| 307; 646523831; | 2241 | 2972 | n/a | n/a | n/a |
| NZ_BATN001000047.1; | | | | | |
| 613; 614; 18/19 | | | | | |
| 308; 484007121; | 1779 | 2820 | 4042 | n/a | n/a |
| NZ_ANAC01000010.1; | | | | | |
| 615; 616; 29/30 | | | | | |
| 309; 651281457; | 1782 | 3556 | 4488 | n/a | n/a |
| NZ_JADG01000010.1; | | | | | |
| 617; 618; 19/20 | | | | | |
| 310; 664428976; | 1854 | 3080 | 4250 | n/a | n/a |
| NZ_KL585179.1; | | | | | |
| 619; 620; 21/22 | | | | | |
| 311; 926412104; | 2266 | 3663 | 4533 | n/a | n/a |
| NZ_LGDY01000113.1; | | | | | |
| 621; 622; 18/19 | | | | | |
| 312; 703210604; | n/a | 3169 | n/a | n/a | n/a |
| NZ_JNYM01000124.1; | | | | | |
| 623; 624; 44/45 | | | | | |
| 313; 471319476; | 1647 | 2774 | 4059 | n/a | n/a |
| NC_020504.1; | | | | | |
| 625; 626; 21/22 | | | | | |
| 314; 485454803; | 2057 | 3525 | 4408 | n/a | n/a |
| NZ_AFRP01001656.1; | | | | | |
| 627; 628; 21/22 | | | | | |
| 315; 664487325; | 1896 | 3157 | 4290 | n/a | n/a |
| NZ_JOJI01000036.1; | | | | | |
| 629; 630; 29/30 | | | | | |
| 316; 297189896; | 1390 | 2438 | 3826 | n/a | n/a |
| NZ_CM000950.1; | | | | | |
| 631; 632; 21/22 | | | | | |
| 317; 297189896; | 1531 | 3268 | 3933 | n/a | n/a |
| NZ_CM000950.1; | | | | | |
| 633; 634; 21/22 | | | | | |
| 318; 398790069; | 2040 | 3371 | 4394 | n/a | n/a |
| NZ_JH725387.1; | | | | | |
| 635; 636; 21/22 | | | | | |
| 319; 754221033; | n/a | 3277 | 4362 | n/a | n/a |
| NZ_CP007574.1; | | | | | |
| 637; 638; 22/23 | | | | | |
| 320; 928998724; | 2273 | 3674 | n/a | n/a | n/a |
| NZ_BBYR01000007.1; | | | | | |
| 639; 640; 19/20 | | | | | |
| 321; 931609467; | n/a | 3683 | 4543 | n/a | n/a |
| NZ_CP012752.1; | | | | | |
| 641; 642; 24/25 | | | | | |
| 322; 484017897; | 1776 | 2829 | 4124 | n/a | n/a |
| NZ_ANBB01000025.1; | | | | | |
| 643; 644; 20/21 | | | | | |
| 323; 943388237; | 2055 | 3606 | 4406 | n/a | n/a |
| NZ_LIQD01000001.1; | | | | | |
| 645; 646; 21/22 | | | | | |
| 324; 398790069; | 1536 | 2625 | 3938 | n/a | n/a |
| NZ_JH725387.1; | | | | | |
| 647; 648; 21/22 | | | | | |
| 325; 224581107; | 1517 | 2602 | 3926 | n/a | n/a |
| NZ_GG657757.1; | | | | | |
| 649; 650; 19/20 | | | | | |
| 326; 664245663; | 1888 | 3109 | 4279 | n/a | n/a |
| NZ_JODF01000003.1; | | | | | |
| 651; 652; 21/22 | | | | | |
| 327; 664026629; | 1870 | 3096 | 4266 | n/a | n/a |
| NZ_JOAP01000049.1; | | | | | |
| 653; 654; 21/22 | | | | | |
| 328; 764439507; | 1848 | 3410 | 4245 | n/a | n/a |
| NZ_JRKI01000027.1; | | | | | |
| 655; 656; 21/22 | | | | | |
| 329; 662059070; | 1845 | 3076 | 4242 | n/a | n/a |
| NZ_KL571162.1; | | | | | |
| 657; 658; 29/30 | | | | | |
| 330; 739830264; | 1991 | 3260 | 4352 | n/a | n/a |
| NZ_JOJE01000040.1; | | | | | |
| 659; 660; 21/22 | | | | | |
| 331; 662063073; | 2082 | 3432 | 4426 | n/a | n/a |
| NZ_JNXV01000303.1; | | | | | |
| 661; 662; 22/23 | | | | | |
| 332; 664141810; | 1881 | 3105 | 4275 | n/a | n/a |
| NZ_JOCQ01000106.1; | | | | | |
| 663; 664; 29/30 | | | | | |
| 333; 799161588; | n/a | 2525 | 3873 | n/a | n/a |
| NZ_JZWZ01000076.1; | | | | | |
| 665; 666; 25/26 | | | | | |
| 334; 664523889; | 1897 | 3603 | 4291 | n/a | n/a |
| NZ_JOFH01000020.1; | | | | | |
| 667; 668; 23/24 | | | | | |
| 335; 754862786; | 1767 | 2968 | 4177 | n/a | n/a |
| NZ_CP007155.1; | | | | | |
| 669; 670; 40/41 | | | | | |
| 336; 655416831; | 1828 | 3054 | 4226 | n/a | n/a |
| NZ_KE386846.1; | | | | | |
| 671; 672; 20/21 | | | | | |
| 337; 662063073; | n/a | 3077 | 4243 | n/a | n/a |
| NZ_JNXV01000303.1; | | | | | |
| 673; 674; 22/23 | | | | | |
| 338; 664523889; | 1993 | 3552 | 4354 | n/a | n/a |
| NZ_JOFH01000020.1; | | | | | |
| 675; 676; 23/24 | | | | | |
| 339; 663122276; | 1853 | 3252 | 4249 | n/a | n/a |
| NZ_JOFJ01000001.1; | | | | | |
| 677; 678; 20/21 | | | | | |
| 340; 654239557; | 1814 | 3269 | 4213 | n/a | n/a |
| NZ_AZWL01000018.1; | | | | | |
| 679; 680; 21/22 | | | | | |
| 341; 926344107; | 2260 | 3654 | 4525 | n/a | n/a |
| NZ_LGEA01000058.1; | | | | | |
| 681; 682; 19/20 | | | | | |
| 342; 765016627; | 2074 | 3416 | 4416 | n/a | n/a |
| NZ_LK022849.1; | | | | | |
| 683; 684; 22/23 | | | | | |
| 343; 765016627; | 2074 | 3416 | 4416 | n/a | n/a |
| NZ_LK022849.1; | | | | | |
| 685; 686; 22/23 | | | | | |
| 344; 755908329; | 1353 | 2385 | 3790 | n/a | n/a |
| CP007219.1; | | | | | |
| 687; 688; 20/21 | | | | | |
| 345; 664061406; | 1863 | 3668 | 3923 | n/a | n/a |
| NZ_JOES01000059.1; | | | | | |
| 689; 690; 29/30 | | | | | |
| 346; 799161588; | n/a | 3620 | 4431 | n/a | n/a |
| NZ_JZWZ01000076.1; | | | | | |
| 691; 692; 25/26 | | | | | |
| 347; 664061406; | 1514 | 3103 | 3923 | n/a | n/a |
| NZ_JOES01000059.1; | | | | | |
| 693; 694; 29/30 | | | | | |
| 348; 664434000; | 1516 | 2601 | 3925 | n/a | n/a |
| NZ_JOIA01001078.1; | | | | | |
| 695; 696; 21/22 | | | | | |
| 349; 429195484; | 2120 | 2653 | 3959 | n/a | n/a |
| NZ_AEJC01000118.1; | | | | | |
| 697; 698; 22/23 | | | | | |
| 350; 664325162; | 1892 | 3112 | 4284 | n/a | n/a |
| NZ_JOJB01000032.1; | | | | | |
| 699; 700; 21/22 | | | | | |
| 351; 664061406; | 1875 | 3160 | 3923 | n/a | n/a |
| NZ_JOES01000059.1; | | | | | |
| 701; 702; 29/30 | | | | | |
| 352; 657301257; | 2070 | 3412 | 4236 | n/a | n/a |
| NZ_AZSD01000480.1; | | | | | |
| 703; 704; 21/22 | | | | | |
| 353; 657301257; | n/a | 3486 | 4236 | n/a | n/a |
| NZ_AZSD01000480.1; | | | | | |
| 705; 706; 21/22 | | | | | |
| 354; 458984960; | 1529 | 3550 | 3931 | n/a | n/a |
| NZ_AORZ01000079.1; | | | | | |
| 707; 708; 12/13 | | | | | |
| 355; 657301257; | 1835 | 3066 | 4236 | n/a | n/a |
| NZ_AZSD01000480.1; | | | | | |
| 709; 710; 21/22 | | | | | |
| 356; 925315417; | 1863 | 3090 | 3923 | n/a | n/a |
| LGCQ01000244.1; | | | | | |
| 711; 712; 29/30 | | | | | |
| 357; 926371517; | 2262 | 3656 | 4527 | n/a | n/a |
| NZ_LGCW01000271.1; | | | | | |
| 713; 714; 29/30 | | | | | |
| 358; 925315417; | 1514 | 3101 | 3923 | n/a | n/a |
| LGCQ01000244.1; | | | | | |
| 715; 716; 29/30 | | | | | |
| 359; 664325162; | 1858 | 3084 | 4254 | n/a | n/a |
| NZ_JOJB01000032.1; | | | | | |
| 717; 718; 21/22 | | | | | |
| 360; 664061406; | 1514 | 3162 | 3923 | n/a | n/a |
| NZ_JOES01000059.1; | | | | | |
| 719; 720; 29/30 | | | | | |
| 361; 926403453; | 2265 | 3661 | 4530 | n/a | n/a |
| NZ_LGDD01000321.1; | | | | | |
| 721; 722; 21/22 | | | | | |
| 362; 671472153; | 1905 | 2915 | 4152 | n/a | n/a |
| NZ_JOFR01000001.1; | | | | | |
| 723; 724; 21/22 | | | | | |
| 363; 471319476; | 1646 | 2773 | 4058 | n/a | n/a |
| NC_020504.1; | | | | | |
| 725; 726; 18/19 | | | | | |
| 364; 739854483; | 1992 | 3262 | 4353 | n/a | n/a |
| NZ_KL997447.1; | | | | | |
| 727; 728; 21/22 | | | | | |
| 365; 926371520; | n/a | 2540 | 3884 | n/a | n/a |
| NZ_LGCW01000274.1; | | | | | |
| 729; 730; 27/28 | | | | | |
| 366; 485454803; | n/a | 3546 | n/a | n/a | n/a |
| NZ_AFRP01001656.1; | | | | | |
| 731; 732; 21/22 | | | | | |
| 367; 738615271; | 2182 | 3218 | n/a | n/a | n/a |
| NZ_JFYZ01000008.1; | | | | | |
| 733; 734; 21/22 | | | | | |
| 368; 738615271; | 2182 | 3218 | n/a | n/a | n/a |
| NZ_JFYZ01000008.1; | | | | | |
| 735; 736; 21/22 | | | | | |
| 369; 738615271; | 2182 | 3218 | n/a | n/a | n/a |
| NZ_JFYZ01000008.1; | | | | | |
| 737; 738; 22/23 | | | | | |
| 370; 664479796; | n/a | 3120 | n/a | n/a | n/a |
| NZ_JOJI01000005.1; | | | | | |
| 739; 740; 19/20 | | | | | |
| 371; 357397620; | 1628 | 2747 | 4035 | n/a | n/a |
| NC_016111.1; | | | | | |
| 741; 742; 13/14 | | | | | |
| 372; 665604093; | 1904 | 3126 | 4299 | n/a | n/a |
| NZ_JNXR01000023.1; | | | | | |
| 743; 744; 21/22 | | | | | |
| 373; 739674258; | 1981 | 3247 | n/a | n/a | n/a |
| NZ_JQMC01000050.1; | | | | | |
| 745; 746; 23/24 | | | | | |
| 374; 664061406; | 1461 | 2532 | 3876 | n/a | n/a |
| NZ_JOES01000059.1; | | | | | |
| 747; 748; 29/30 | | | | | |
| 375; 664061406; | 1467 | 2538 | 3882 | n/a | n/a |
| NZ_JOES01000059.1; | | | | | |
| 749; 750; 29/30 | | | | | |
| 376; 926371517; | 1469 | 2541 | 3885 | n/a | n/a |
| NZ_LGCW01000271.1; | | | | | |
| 751; 752; 29/30 | | | | | |
| 377; 664244706; | 1886 | 3108 | 4277 | n/a | n/a |
| NZ_JOBD01000002.1; | | | | | |
| 753; 754; 24/25 | | | | | |
| 378; 925315417; | 1463 | 2534 | 3878 | n/a | n/a |
| LGCQ01000244.1; | | | | | |
| 755; 756; 29/30 | | | | | |
| 379; 646529442; | 1769 | 2973 | n/a | n/a | n/a |
| NZ_BATN001000092.1; | | | | | |
| 757; 758; 18/19 | | | | | |
| 380; 906344334; | 2132 | 3513 | n/a | n/a | n/a |
| NZ_LFXA01000002.1; | | | | | |
| 759; 760; 12/13 | | | | | |
| 381; 926344331; | 2261 | 3655 | 4526 | n/a | n/a |
| NZ_LGEA01000105.1; | | | | | |
| 761; 762; 21/22 | | | | | |
| 382; 664421883; | 1893 | 3115 | 4286 | n/a | n/a |
| NZ_JODC01000023.1; | | | | | |
| 763; 764; 21/22 | | | | | |
| 383; 755134941; | 2240 | 3626 | n/a | n/a | n/a |
| NZ_BBPI01000030.1; | | | | | |
| 765; 766; 22/23 | | | | | |
| 384; 663596322; | 1866 | 3602 | 4261 | n/a | n/a |
| NZ_JOEF01000022.1; | | | | | |
| 767; 768; 21/22 | | | | | |
| 385; 664063830; | 1876 | 3098 | 4271 | n/a | n/a |
| NZ_JODT01000002.1; | | | | | |
| 769; 770; 13/14 | | | | | |
| 386; 484203522; | 1691 | 2842 | 4100 | n/a | n/a |
| NZ_AQUI01000002.1; | | | | | |
| 771; 772; 12/13 | | | | | |
| 387; 365867746; | 1394 | 2445 | 3832 | n/a | n/a |
| NZ_AGSW01000272.1; | | | | | |
| 773; 774; 22/23 | | | | | |
| 388; 759802587; | 2059 | 3399 | 4409 | n/a | n/a |
| NZ_CP009438.1; | | | | | |
| 775; 776; 21/22 | | | | | |
| 389; 664325162; | 1358 | 2393 | 3795 | n/a | n/a |
| NZ_JOJB01000032.1; | | | | | |
| 777; 778; 21/22 | | | | | |
| 390; 484008051; | 1680 | 2824 | 4089 | n/a | n/a |
| NZ_ANAD01000197.1; | | | | | |
| 779; 780; 24/25 | | | | | |
| 391; 458848256; | 1540 | 3327 | 3942 | n/a | n/a |
| NZ_AOH001000055.1; | | | | | |
| 781; 782; 21/22 | | | | | |
| 392; 458848256; | 1402 | 2456 | 3836 | n/a | n/a |
| NZ_AOHO01000055.1; | | | | | |
| 783; 784; 21/22 | | | | | |
| 393; 664478668; | 1855 | 3272 | 4251 | n/a | n/a |
| NZ_JOJI01000002.1; | | | | | |
| 785; 786; 19/20 | | | | | |
| 394; 484008051; | 1778 | 2825 | 4090 | n/a | n/a |
| NZ_ANAD01000197.1; | | | | | |
| 787; 788; 24/25 | | | | | |
| 395; 365867746; | n/a | 3155 | 3946 | n/a | n/a |
| NZ_AGSW01000272.1; | | | | | |
| 789; 790; 22/23 | | | | | |
| 396; 873282818; | n/a | 3487 | 4461 | n/a | n/a |
| NZ_LFEH01000123.1; | | | | | |
| 791; 792; 25/26 | | | | | |
| 397; 664061406; | 1514 | 3382 | 3923 | n/a | n/a |
| NZ_JOES01000059.1; | | | | | |
| 793; 794; 29/30 | | | | | |
| 398; 873282818; | n/a | 3466 | 4234 | n/a | n/a |
| NZ_LFEH01000123.1; | | | | | |
| 795; 796; 25/26 | | | | | |
| 399; 906344339; | 2133 | 3514 | 4471 | n/a | n/a |
| NZ_LFXA01000007.1; | | | | | |
| 797; 798; 19/20 | | | | | |
| 400; 759944049; | 2061 | 3609 | n/a | n/a | n/a |
| NZ_JOAG01000029.1; | | | | | |
| 799; 800; 28/29 | | | | | |
| 401; 557839714; | 1745 | 2913 | n/a | n/a | n/a |
| NZ_AWGF01000010.1; | | | | | |
| 801; 802; 28/29 | | | | | |
| 402; 695870063; | n/a | 3537 | 4306 | n/a | n/a |
| NZ_JNWW01000028.1; | | | | | |
| 803; 804; 23/24 | | | | | |
| 403; 749181963; | 2013 | 3598 | 4368 | n/a | n/a |
| NZ_CP003987.1; | | | | | |
| 805; 806; 12/13 | | | | | |
| 404; 852460626; | 1359 | 2394 | 3796 | n/a | n/a |
| CP011799.1; | | | | | |
| 807; 808; 13/14 | | | | | |
| 405; 374982757; | 1332 | 2357 | 3767 | n/a | 3768 |
| NC_016582.1; | | | | | |
| 809; 810; 13/14 | | | | | |
| 406; 374982757; | 1332 | 2357 | 3767 | n/a | 3768 |
| NC_016582.1; | | | | | |
| 811; 812; 28/29 | | | | | |
| 407; 914607448; | n/a | 2529 | n/a | n/a | n/a |
| NZ_JYNE01000028.1; | | | | | |
| 813; 814; 22/23 | | | | | |
| 408; 663373497; | 1861 | 3088 | 4257 | n/a | n/a |
| NZ_JOFL01000043.1; | | | | | |
| 815; 816; 19/20 | | | | | |
| 409; 764442321; | n/a | 3625 | 4415 | n/a | n/a |
| NZ_JRKI01000041.1; | | | | | |
| 817; 818; 29/30 | | | | | |
| 410; 739702045; | 2214 | 3250 | n/a | n/a | n/a |
| NZ_JNFC01000030.1; | | | | | |
| 819; 820; 18/19 | | | | | |
| 411; 485090585; | n/a | 2870 | 4115 | n/a | n/a |
| NZ_KB907209.1; | | | | | |
| 821; 822; 20/21 | | | | | |
| 412; 764442321; | 1847 | 3586 | 4501 | n/a | n/a |
| NZ_JRKI01000041.1; | | | | | |
| 823; 824; 29/30 | | | | | |
| 413; 514916412; | 1659 | 3591 | 4350 | n/a | n/a |
| NZ_AOPZ01000028.1; | | | | | |
| 825; 826; 33/34 | | | | | |
| 414; 514916412; | 1408 | 2462 | 3840 | n/a | n/a |
| NZ_AOPZ01000028.1; | | | | | |
| 827; 828; 33/34 | | | | | |
| 415; 970574347; | 1839 | 2873 | 4118 | n/a | n/a |
| NZ_LNZF01000001.1; | | | | | |
| 829; 830; 20/21 | | | | | |
| 416; 970574347; | 1768 | 2969 | 4084 | n/a | n/a |
| NZ_LNZF01000001.1; | | | | | |
| 831; 832; 20/21 | | | | | |
| 417; 906292938; | 1915 | 3139 | n/a | n/a | n/a |
| CXPB01000073.1; | | | | | |
| 833; 834; 18/19 | | | | | |
| 418; 906292938; | 1383 | 2431 | n/a | n/a | n/a |
| CXPB01000073.1; | | | | | |
| 835; 836; 18/19 | | | | | |
| 419; 970574347; | 1662 | 2799 | 4074 | n/a | n/a |
| NZ_LNZF01000001.1; | | | | | |
| 837; 838; 20/21 | | | | | |
| 420; 671525382; | n/a | 3130 | 4496 | n/a | n/a |
| NZ_JODL01000019.1; | | | | | |
| 839; 840; 31/32 | | | | | |
| 421; 652698054; | 1748 | 2934 | 4159 | n/a | n/a |
| NZ_KI912610.1; | | | | | |
| 841; 842; 26/27 | | | | | |
| 422; 652698054; | 1750 | 2936 | 4159 | n/a | n/a |
| NZ_KI912610.1; | | | | | |
| 843; 844; 26/27 | | | | | |
| 423; 756828038; | 2050 | 3381 | 4403 | n/a | n/a |
| NZ_CCNC01000143.1; | | | | | |
| 845; 846; 26/27 | | | | | |
| 424; 662140302; | 2135 | 3356 | 3988 | n/a | n/a |
| NZ_JMUB01000087.1; | | | | | |
| 847; 848; 22/23 | | | | | |
| 425; 751285871; | 2224 | 3342 | 4382 | n/a | n/a |
| NZ_CCNA01000001.1; | | | | | |
| 849; 850; 26/27 | | | | | |
| 426; 662140302; | n/a | 2348 | 3763 | n/a | n/a |
| NZ_JMUB01000087.1; | | | | | |
| 851; 852; 22/23 | | | | | |
| 427; 751292755; | n/a | 3343 | 4381 | n/a | n/a |
| NZ_CCNE01000004.1; | | | | | |
| 853; 854; 26/27 | | | | | |
| 428; 970574347; | n/a | 3419 | 4418 | n/a | n/a |
| NZ_LNZF01000001.1; | | | | | |
| 855; 856; 20/21 | | | | | |
| 429; 484099183; | 1721 | 2880 | 4126 | n/a | n/a |
| NZ_AJTY01001072.1; | | | | | |
| 857; 858; 19/20 | | | | | |
| 430; 484099183; | n/a | 3324 | n/a | n/a | n/a |
| NZ AJTY01001072.1; | | | | | |
| 859; 860; 19/20 | | | | | |
| 431; 751265275; | n/a | 3340 | 4380 | n/a | n/a |
| NZ_CCMY01000220.1; | | | | | |
| 861; 862; 26/27 | | | | | |
| 432; 662140302; | 2189 | 3079 | 4240 | n/a | n/a |
| NZ_JMUB01000087.1; | | | | | |
| 863; 864; 22/23 | | | | | |
| 433; 428296779; | n/a | 2764 | 4053 | n/a | n/a |
| NC_019751.1; | | | | | |
| 865; 866; 21/22 | | | | | |
| 434; 662140302; | 2162 | 3075 | 4240 | n/a | n/a |
| NZ_JMUB01000087.1; | | | | | |
| 867; 868; 22/23 | | | | | |
| 435; 563312125; | 1319 | 2340 | n/a | n/a | n/a |
| AYTZ01000052.1; | | | | | |
| 869; 870; 31/32 | | | | | |
| 436; 357028583; | n/a | 2621 | 3936 | n/a | n/a |
| NZ_AGSN01000187.1; | | | | | |
| 871; 872; 26/27 | | | | | |
| 437; 655569633; | 1971 | 3057 | 4491 | n/a | n/a |
| NZ_JIAI01000002.1; | | | | | |
| 873; 874; 32/33 | | | | | |
| 438; 655569633; | 1971 | 3057 | 4491 | n/a | n/a |
| NZ_JIAI01000002.1; | | | | | |
| 875; 876; 43/44 | | | | | |
| 439; 655569633; | 1971 | 3057 | 4491 | n/a | n/a |
| NZ_JIAI01000002.1; | | | | | |
| 877; 878; 32/33 | | | | | |
| 440; 970574347; | 2017 | 3330 | 4373 | n/a | n/a |
| NZ_LNZF01000001.1; | | | | | |
| 879; 880; 20/21 | | | | | |
| 441; 482849861; | 1563 | 2656 | 3963 | n/a | n/a |
| NZ_AKBU01000001.1; | | | | | |
| 881; 882; 3/4 | | | | | |
| 442; 482849861; | 1506 | 2779 | 3985 | n/a | n/a |
| NZ_AKBU01000001.1; | | | | | |
| 883; 884; 3/4 | | | | | |
| 443; 737350949; | 1945 | 3198 | 4328 | n/a | n/a |
| NZ_APVL01000034.1; | | | | | |
| 885; 886; 27/28 | | | | | |
| 444; 482849861; | 1590 | 2689 | 3985 | n/a | n/a |
| NZ_AKBU01000001.1; | | | | | |
| 887; 888; 3/4 | | | | | |
| 445; 671546962; | n/a | 3131 | n/a | n/a | n/a |
| NZ_KL370786.1; | | | | | |
| 889; 890; 33/34 | | | | | |
| 446; 652698054; | 1346 | 2379 | 3788 | n/a | n/a |
| NZ_KI912610.1; | | | | | |
| 891; 892; 26/27 | | | | | |
| 447; 808064534; | 2088 | 3445 | 4433 | n/a | n/a |
| NZ_KQ040798.1; | | | | | |
| 893; 894; 17/18 | | | | | |
| 448; 808051893; | 2088 | 3445 | 4433 | n/a | n/a |
| NZ_KQ040793.1; | | | | | |
| 895; 896; 17/18 | | | | | |
| 449; 808051893; | 2088 | 3445 | 4433 | n/a | n/a |
| NZ_KQ040793.1; | | | | | |
| 897; 898; 10/11 | | | | | |
| 450; 808051893; | 2088 | 3445 | 4433 | n/a | n/a |
| NZ_KQ040793.1; | | | | | |
| 899; 900; 11/12 | | | | | |
| 451; 484016872; | n/a | 2828 | n/a | n/a | n/a |
| NZ_ANAY01000016.1; | | | | | |
| 901; 902; 27/28 | | | | | |
| 452; 736629899; | n/a | 3185 | 4322 | n/a | n/a |
| NZ_JOTN01000004.1; | | | | | |
| 903; 904; 19/20 | | | | | |
| 453; 483219562; | 1698 | 2850 | 4104 | n/a | n/a |
| NZ_KB901875.1; | | | | | |
| 905; 906; 43/44 | | | | | |
| 454; 375307420; | 1542 | 2632 | 3945 | n/a | n/a |
| NZ_JH601049.1; | | | | | |
| 907; 908; 20/21 | | | | | |
| 455; 664540649; | 1898 | 3124 | 4293 | n/a | n/a |
| NZ_JOAX01000009.1; | | | | | |
| 909; 910; 21/22 | | | | | |
| 456; 765315585; | 2075 | 3417 | 4417 | n/a | n/a |
| NZ_LN812103.1; | | | | | |
| 911; 912; 27/28 | | | | | |
| 457; 765315585; | 2075 | 3417 | 4417 | n/a | n/a |
| NZ_LN812103.1; | | | | | |
| 913; 914; 19/20 | | | | | |
| 458; 484099183; | 1771 | 2976 | 4179 | n/a | n/a |
| NZ_AJTY01001072.1; | | | | | |
| 915; 916; 19/20 | | | | | |
| 459; 647274605; | 1752 | 2948 | 4164 | n/a | n/a |
| NZ_ASSA01000134.1; | | | | | |
| 917; 918; 20/21 | | | | | |
| 460; 970574347; | 1770 | 2974 | 4008 | n/a | n/a |
| NZ_LNZF01000001.1; | | | | | |
| 919; 920; 20/21 | | | | | |
| 461; 970574347; | 1610 | 2717 | 4008 | n/a | n/a |
| NZ_LNZF01000001.1; | | | | | |
| 921; 922; 20/21 | | | | | |
| 462; 749188513; | 2012 | 3318 | 4505 | n/a | n/a |
| NZ_CP009122.1; | | | | | |
| 923; 924; 25/26 | | | | | |
| 463; 749188513; | 2012 | 3318 | 4505 | n/a | n/a |
| NZ_CP009122.1; | | | | | |
| 925; 926; 19/20 | | | | | |
| 464; 647269417; | n/a | 2977 | 4180 | n/a | n/a |
| NZ_ASSB01000031.1; | | | | | |
| 927; 928; 20/21 | | | | | |
| 465; 749188513; | 1350 | 2382 | 3789 | n/a | n/a |
| NZ_CP009122.1; | | | | | |
| 929; 930; 25/26 | | | | | |
| 466; 749188513; | 1350 | 2382 | 3789 | n/a | n/a |
| NZ_CP009122.1; | | | | | |
| 931; 932; 19/20 | | | | | |
| 467; 746717390; | n/a | 3321 | n/a | n/a | n/a |
| NZ_JSEF01000015.1; | | | | | |
| 933; 934; 16/17 | | | | | |
| 468; 738760618; | 1966 | 3221 | 4503 | n/a | n/a |
| NZ_JQCR01000002.1; | | | | | |
| 935; 936; 19/20 | | | | | |
| 469; 647230448; | n/a | 2975 | 4178 | n/a | n/a |
| NZ_ASRY01000102.1; | | | | | |
| 937; 938; 20/21 | | | | | |
| 470; 485067426; | 1714 | 2869 | 4114 | n/a | n/a |
| NZ_KB235914.1; | | | | | |
| 939; 940; 26/27 | | | | | |
| 471; 378759075; | 1522 | 3498 | 3929 | n/a | n/a |
| NZ_AFXE01000029.1; | | | | | |
| 941; 942; 22/23 | | | | | |
| 472; 924434005; | 1840 | 3071 | 4238 | n/a | n/a |
| LIYK01000027.1; | | | | | |
| 943; 944; 20/21 | | | | | |
| 473; 647274605; | 1772 | 2978 | 4181 | n/a | n/a |
| NZ_ASSA01000134.1; | | | | | |
| 945; 946; 20/21 | | | | | |
| 474; 152991597; | 1594 | 2693 | 3989 | n/a | n/a |
| NC_009663.1; | | | | | |
| 947; 948; 36/37 | | | | | |
| 475; 647274605; | 2064 | 2716 | 4007 | n/a | n/a |
| NZ_ASSA01000134.1; | | | | | |
| 949; 950; 20/21 | | | | | |
| 476; 751292755; | n/a | 3341 | 4381 | n/a | n/a |
| NZ_CCNE01000004.1; | | | | | |
| 951; 952; 26/27 | | | | | |
| 477; 256419057; | 1602 | 2702 | 3995 | n/a | n/a |
| NC_013132.1; | | | | | |
| 953; 954; 27/28 | | | | | |
| 478; 256419057; | 1602 | 2702 | 3995 | n/a | n/a |
| NC_013132.1; | | | | | |
| 955; 956; 27/28 | | | | | |
| 479; 806905234; | 2236 | 3443 | 4432 | n/a | n/a |
| NZ_LARW01000040.1; | | | | | |
| 957; 958; 11/12 | | | | | |
| 480; 663372343; | 1860 | 3086 | 4256 | n/a | n/a |
| NZ_JOFL01000022.1; | | | | | |
| 959; 960; 44/45 | | | | | |
| 481; 808064534; | 2089 | 3622 | 4434 | n/a | n/a |
| NZ_KQ040798.1; | | | | | |
| 961; 962; 10/11 | | | | | |
| 482; 808064534; | 2089 | 3622 | 4434 | n/a | n/a |
| NZ_KQ040798.1; | | | | | |
| 963; 964; 17/18 | | | | | |
| 483; 808064534; | 2089 | 3622 | 4434 | n/a | n/a |
| NZ_KQ040798.1; | | | | | |
| 965; 966; 10/11 | | | | | |
| 484; 808064534; | 2089 | 3622 | 4434 | n/a | n/a |
| NZ_KQ040798.1; | | | | | |
| 967; 968; 17/18 | | | | | |
| 485; 566226100; | 1422 | 2477 | 3853 | n/a | n/a |
| AZLX01000058.1; | | | | | |
| 969; 970; 27/28 | | | | | |
| 486; 662097244; | 1846 | 3078 | 4244 | n/a | n/a |
| NZ_KL575165.1; | | | | | |
| 971; 972; 20/21 | | | | | |
| 487; 647274605; | 1823 | 3045 | 4181 | n/a | n/a |
| NZ_ASSA01000134.1; | | | | | |
| 973; 974; 20/21 | | | | | |
| 488; 924434005; | 2000 | 3306 | 4366 | n/a | n/a |
| LIYK01000027.1; | | | | | |
| 975; 976; 20/21 | | | | | |
| 489; 378759075; | 1522 | 2609 | 3929 | n/a | n/a |
| NZ_AFXE01000029.1; | | | | | |
| 977; 978; 22/23 | | | | | |
| 490; 647274605; | 1752 | 3637 | 4520 | n/a | n/a |
| NZ_ASSA01000134.1; | | | | | |
| 979; 980; 20/21 | | | | | |
| 491; 751299847; | n/a | 3344 | 4381 | n/a | n/a |
| NZ_CCMZ01000015.1; | | | | | |
| 981; 982; 26/27 | | | | | |
| 492; 375307420; | 1576 | 2665 | 3967 | n/a | n/a |
| NZ_JH601049.1; | | | | | |
| 983; 984; 20/21 | | | | | |
| 493; 906344334; | 2131 | 3512 | 4470 | n/a | n/a |
| NZ_LFXA01000002.1; | | | | | |
| 985; 986; 25/26 | | | | | |
| 494; 759948103; | 2063 | 3611 | 4412 | n/a | n/a |
| NZ_JOAG01000045.1; | | | | | |
| 987; 988; 27/28 | | | | | |
| 495; 664478668; | 1895 | 3119 | 4288 | n/a | n/a |
| NZ_JOJI01000002.1; | | | | | |
| 989; 990; 19/20 | | | | | |
| 496; 662043624; | n/a | 3264 | 4241 | n/a | n/a |
| NZ_JNXL01000469.1; | | | | | |
| 991; 992; 22/23 | | | | | |
| 497; 906344334; | 1458 | 2528 | 3874 | n/a | n/a |
| NZ_LFXA01000002.1; | | | | | |
| 993; 994; 25/26 | | | | | |
| 498; 664104387; | 1879 | 3102 | 3924 | n/a | n/a |
| NZ_JOJJ01000005.1; | | | | | |
| 995; 996; 19/20 | | | | | |
| 499; 664104387; | 1862 | 3089 | 4258 | n/a | n/a |
| NZ_JOJJ01000005.1; | | | | | |
| 997; 998; 19/20 | | | | | |
| 500; 664104387; | 1880 | 3104 | 4274 | n/a | n/a |
| NZ_JOJJ1000005.1; | | | | | |
| 999; 1000; 19/20 | | | | | |
| 501; 664565137; | 1900 | 3605 | 4511 | n/a | n/a |
| NZ_KL591029.1; | | | | | |
| 1001; 1002; 19/20 | | | | | |
| 502; 664104387; | 1466 | 2537 | 3881 | n/a | n/a |
| NZ_JOJJ01000005.1; | | | | | |
| 1003; 1004; 19/20 | | | | | |
| 503; 664104387; | 1462 | 2533 | 3877 | n/a | n/a |
| NZ_JOJJ01000005.1; | | | | | |
| 1005; 1006; 19/20 | | | | | |
| 504; 664104387; | 1515 | 3669 | 3924 | n/a | n/a |
| NZ_JOJJ01000005.1; | | | | | |
| 1007; 1008; 19/20 | | | | | |
| 505; 664104387; | 1515 | 3161 | 4307 | n/a | n/a |
| NZ_JOJJ01000005.1; | | | | | |
| 1009; 1010; 19/20 | | | | | |
| 506; 664104387; | 1515 | 2600 | 3924 | n/a | n/a |
| NZ_JOJJ01000005.1; | | | | | |
| 1011; 1012; 19/20 | | | | | |
| 507; 664323078; | 1891 | 3111 | 4283 | n/a | n/a |
| NZ_JOIB01000032.1; | | | | | |
| 1013; 1014; 19/20 | | | | | |
| 508; 315499382; | 2137 | 2723 | n/a | n/a | n/a |
| NC_014817.1; | | | | | |
| 1015; 1016; 25/26 | | | | | |
| 509; 315499382; | 2137 | 2723 | n/a | n/a | n/a |
| NC_014817.1; | | | | | |
| 1017; 1018; 25/26 | | | | | |
| 510; 664066234; | 2263 | 3658 | 4272 | n/a | n/a |
| NZ_JOES01000124.1; | | | | | |
| 1019; 1020; 19/20 | | | | | |
| 511; 740092143; | n/a | 3585 | 4358 | n/a | n/a |
| NZ_JFCB01000064.1; | | | | | |
| 1021; 1022; 19/20 | | | | | |
| 512; 930029075; | 2276 | 3677 | n/a | n/a | n/a |
| NZ_LJHO01000007.1; | | | | | |
| 1023; 1024; 18/19 | | | | | |
| 513; 664104387; | 1515 | 3100 | 4273 | n/a | n/a |
| NZ_JOJJ01000005.1; | | | | | |
| 1025; 1026; 19/20 | | | | | |
| 514; 664104387; | 1515 | 3127 | 4258 | n/a | n/a |
| NZ_JOJJ01000005.1; | | | | | |
| 1027; 1028; 19/20 | | | | | |
| 515; 664104387; | 1464 | 2535 | 3879 | n/a | n/a |
| NZ_JOJJ01000005.1; | | | | | |
| 1029; 1030; 19/20 | | | | | |
| 516; 902792184; | n/a | 3511 | 4469 | n/a | n/a |
| NZ_LFVW01000692.1; | | | | | |
| 1031; 1032; 22/23 | | | | | |
| 517; 485125031; | 2161 | 3553 | 4378 | n/a | n/a |
| NZ_BAGL01000055.1; | | | | | |
| 1033; 1034; 18/19 | | | | | |
| 518; 759934284; | 2223 | 3607 | 4410 | n/a | n/a |
| NZ_JOAG01000009.1; | | | | | |
| 1035; 1036; 23/24 | | | | | |
| 519; 759934284; | 2223 | 3607 | 4410 | n/a | n/a |
| NZ_JOAG01000009.1; | | | | | |
| 1037; 1038; 23/24 | | | | | |
| 520; 746288194; | 2004 | 3310 | n/a | n/a | n/a |
| NZ_JRVC01000013.1; | | | | | |
| 1039; 1040; 22/23 | | | | | |
| 521; 664194528; | n/a | 2389 | n/a | n/a | n/a |
| NZ_JOIG01000002.1; | | | | | |
| 1041; 1042; 23/24 | | | | | |
| 522; 664194528; | n/a | 3455 | n/a | n/a | n/a |
| NZ_JOIG01000002.1; | | | | | |
| 1043; 1044; 23/24 | | | | | |
| 523; 664066234; | 1877 | 3099 | 4272 | n/a | n/a |
| NZ_JOES01000124.1; | | | | | |
| 1045; 1046; 19/20 | | | | | |
| 524; 664066234; | 1468 | 2539 | 3883 | n/a | n/a |
| NZ_JOES01000124.1; | | | | | |
| 1047; 1048; 19/20 | | | | | |
| 525; 72160406; | 1584 | 2676 | 3975 | n/a | n/a |
| NC_007333.1; | | | | | |
| 1049; 1050; 22/23 | | | | | |
| 526; 926371520; | n/a | 3657 | 4528 | n/a | n/a |
| NZ_LGCW01000274.1; | | | | | |
| 1051; 1052; 27/28 | | | | | |
| 527; 664244706; | 1887 | 3577 | 4278 | n/a | n/a |
| NZ_JOBD01000002.1; | | | | | |
| 1053; 1054; 27/28 | | | | | |
| 528; 739594477; | 1973 | 3236 | n/a | n/a | n/a |
| NZ_JFHR01000025.1; | | | | | |
| 1055; 1056; 22/23 | | | | | |
| 529; 808402906; | 1376 | 2422 | n/a | n/a | n/a |
| CCBH010000144.1; | | | | | |
| 1057; 1058; 23/24 | | | | | |
| 530; 746242072; | 2217 | 3308 | n/a | n/a | n/a |
| NZ_JIDI01000011.1; | | | | | |
| 1059; 1060; 23/24 | | | | | |
| 531; 72160406; | 1584 | 2790 | 3975 | n/a | n/a |
| NC_007333.1; | | | | | |
| 1061; 1062; 22/23 | | | | | |
| 532; 664194528; | n/a | 3106 | n/a | n/a | n/a |
| NZ_JOIG01000002.1; | | | | | |
| 1063; 1064; 23/24 | | | | | |
| 533; 483527356; | 1709 | 2863 | n/a | n/a | n/a |
| NZ_BARE01000016.1; | | | | | |
| 1065; 1066; 22/23 | | | | | |
| 534; 936191447; | n/a | 3687 | n/a | n/a | n/a |
| NZ_LBLZ01000002.1; | | | | | |
| 1067; 1068; 22/23 | | | | | |
| 535; 484226753; | 1692 | 2843 | n/a | n/a | n/a |
| NZ_AQWM01000013.1; | | | | | |
| 1069; 1070; 21/22 | | | | | |
| 536; 664104387; | 1465 | 2536 | 3880 | n/a | n/a |
| NZ_JOJJ01000005.1; | | | | | |
| 1071; 1072; 19/20 | | | | | |
| 537; 484227180; | 1694 | 2845 | 4101 | n/a | n/a |
| NZ_AQWO01000002.1; | | | | | |
| 1073; 1074; 18/19 | | | | | |
| 538; 664104387; | 1515 | 3667 | 3924 | n/a | n/a |
| NZ_JOJJ01000005.1; | | | | | |
| 1075; 1076; 19/20 | | | | | |
| 539; 936191447; | n/a | 2399 | n/a | n/a | n/a |
| NZ_LBLZ01000002.1; | | | | | |
| 1077; 1078; 22/23 | | | | | |
| 540; 484113405; | 1730 | 2895 | n/a | n/a | n/a |
| NZ_BACX01000237.1; | | | | | |
| 1079; 1080; 23/24 | | | | | |
| 541; 664063830; | 1990 | 3571 | 4497 | n/a | n/a |
| NZ_JODT01000002.1; | | | | | |
| 1081; 1082; 28/29 | | | | | |
| 542; 451338568; | 1530 | 2617 | 3932 | n/a | n/a |
| NZ_ANMG01000060.1; | | | | | |
| 1083; 1084; 18/19 | | | | | |
| 543; 544819688; | 1728 | 2892 | n/a | n/a | n/a |
| NZ_AIHL01000147.1; | | | | | |
| 1085; 1086; 18/19 | | | | | |
| 544; 557833377; | 1742 | 2910 | n/a | n/a | n/a |
| NZ_AWGE01000008.1; | | | | | |
| 1087; 1088; 20/21 | | | | | |
| 545; 557833377; | 1742 | 2910 | n/a | n/a | n/a |
| NZ_AWGE01000008.1; | | | | | |
| 1089; 1090; 22/23 | | | | | |
| 546; 347526385; | 1625 | 2743 | n/a | n/a | n/a |
| NC_015976.1; | | | | | |
| 1091; 1092; 21/22 | | | | | |
| 547; 334133217; | 2031 | 2732 | n/a | n/a | n/a |
| NC_015579.1; | | | | | |
| 1093; 1094; 23/24 | | | | | |
| 548; 746241774; | 2002 | 3594 | n/a | n/a | n/a |
| NZ_JTDI01000009.1; | | | | | |
| 1095; 1096; 24/25 | | | | | |
| 549; 659864921; | 1843 | 3074 | n/a | n/a | n/a |
| NZ_JONW01000006.1; | | | | | |
| 1097; 1098; 20/21 | | | | | |
| 550; 659864921; | 1843 | 3074 | n/a | n/a | n/a |
| NZ_JONW01000006.1; | | | | | |
| 1099; 1100; 20/21 | | | | | |
| 551; 294023656; | 1608 | 2709 | n/a | n/a | n/a |
| NC_014007.1; | | | | | |
| 1101; 1102; 23/24 | | | | | |
| 552; 749321911; | 1765 | 2966 | n/a | n/a | n/a |
| NZ_CP006644.1; | | | | | |
| 1103; 1104; 18/19 | | | | | |
| 553; 739630357; | 1977 | 3559 | n/a | n/a | n/a |
| NZ_JFYY01000027.1; | | | | | |
| 1105; 1106; 21/22 | | | | | |
| 554; 739622900; | 1975 | 3240 | n/a | n/a | n/a |
| NZ_JPPQ01000069.1; | | | | | |
| 1107; 1108; 12/13 | | | | | |
| 555; 663365281; | n/a | 3589 | 4255 | n/a | n/a |
| NZ_JODN01000094.1; | | | | | |
| 1109; 1110; 22/23 | | | | | |
| 556; 484226810; | 1693 | 2844 | n/a | n/a | n/a |
| NZ_AQWM01000032.1; | | | | | |
| 1111; 1112; 24/25 | | | | | |
| 557; 759429528; | 2177 | 3387 | n/a | n/a | n/a |
| NZ_JEMV01000036.1; | | | | | |
| 1113; 1114; 23/24 | | | | | |
| 558; 654975403; | 2173 | 3043 | 4486 | n/a | n/a |
| NZ_KI601366.1; | | | | | |
| 1115; 1116; 27/28 | | | | | |
| 559; 541476958; | 1729 | 3334 | 4375 | n/a | n/a |
| AWSB01000006.1; | | | | | |
| 1117; 1118; 58/59 | | | | | |
| 560; 484207511; | 1720 | 2879 | 4125 | n/a | n/a |
| NZ_AQUZ01000008.1; | | | | | |
| 1119; 1120; 20/21 | | | | | |
| 561; 484867900; | n/a | 2864 | n/a | n/a | n/a |
| NZ_AGNH01000612.1; | | | | | |
| 1121; 1122; 15/16 | | | | | |
| 562; 544811486; | 1908 | 2891 | n/a | n/a | n/a |
| NZ_ATDP01000107.1; | | | | | |
| 1123; 1124; 17/18 | | | | | |
| 563; 783211546; | 2085 | 3439 | 4428 | n/a | n/a |
| NZ_JZKH01000064.1; | | | | | |
| 1125; 1126; 30/31 | | | | | |
| 564; 873296042; | 2116 | 3488 | n/a | n/a | n/a |
| NZ_LECE01000021.1; | | | | | |
| 1127; 1128; 14/15 | | | | | |
| 565; 651281457; | 1937 | 3557 | 4489 | n/a | n/a |
| NZ_JADG01000010.1; | | | | | |
| 1129; 1130; 20/21 | | | | | |
| 566; 664348063; | n/a | 3495 | 4465 | n/a | n/a |
| NZ_JOFN01000002.1; | | | | | |
| 1131; 1132; 29/30 | | | | | |
| 567; 893711343; | 2123 | 3246 | n/a | n/a | n/a |
| NZ_KQ235994.1; | | | | | |
| 1133; 1134; 12/13 | | | | | |
| 568; 893711343; | 2123 | 3499 | n/a | n/a | n/a |
| NZ_KQ235994.1; | | | | | |
| 1135; 1136; 12/13 | | | | | |
| 569; 663365281; | n/a | 3576 | 4255 | n/a | n/a |
| NZ_JODN01000094.1; | | | | | |
| 1137; 1138; 22/23 | | | | | |
| 570; 739661773; | 1980 | 3587 | n/a | n/a | n/a |
| NZ_JGVR01000002.1; | | | | | |
| 1139; 1140; 13/14 | | | | | |
| 571; 739661773; | 1978 | 2608 | n/a | n/a | n/a |
| NZ_JGVR01000002.1; | | | | | |
| 1141; 1142; 13/14 | | | | | |
| 572; 749188513; | 1349 | 2381 | n/a | n/a | n/a |
| NZ_CP009122.1; | | | | | |
| 1143; 1144; 23/24 | | | | | |
| 573; 734983422; | 1932 | 3181 | n/a | n/a | n/a |
| NZ_JSXI01000079.1; | | | | | |
| 1145; 1146; 18/19 | | | | | |
| 574; 930029077; | 2277 | 3678 | n/a | n/a | n/a |
| NZ_LJHO01000009.1; | | | | | |
| 1147; 1148; 22/23 | | | | | |
| 575; 664556736; | 1899 | 3604 | 4294 | n/a | n/a |
| NZ_KL591003.1; | | | | | |
| 1149; 1150; 40/41 | | | | | |
| 576; 739701660; | 1984 | 3249 | n/a | n/a | n/a |
| NZ_JNFC01000024.1; | | | | | |
| 1151; 1152; 20/21 | | | | | |
| 577; 737322991; | 2200 | 3195 | n/a | n/a | n/a |
| NZ_JMQR01000005.1; | | | | | |
| 1153; 1154; 20/21 | | | | | |
| 578; 737322991; | 2200 | 3195 | n/a | n/a | n/a |
| NZ_JMQR01000005.1; | | | | | |
| 1155; 1156; 20/21 | | | | | |
| 579; 557839256; | 1744 | 2912 | n/a | n/a | n/a |
| NZ_AWGF01000005.1; | | | | | |
| 1157; 1158; 24/25 | | | | | |
| 580; 737322991; | 1437 | 2499 | n/a | n/a | n/a |
| NZ_JMQR01000005.1; | | | | | |
| 1159; 1160; 20/21 | | | | | |
| 581; 737322991; | 1437 | 2499 | n/a | n/a | n/a |
| NZ_JMQR01000005.1; | | | | | |
| 1161; 1162; 20/21 | | | | | |
| 582; 783211546; | 2086 | 3621 | 4429 | n/a | n/a |
| NZ_JZKH01000064.1; | | | | | |
| 1163; 1164; 30/31 | | | | | |
| 583; 893711364; | 2124 | 3500 | n/a | n/a | n/a |
| NZ_KQ236015.1; | | | | | |
| 1165; 1166; 21/22 | | | | | |
| 584; 543418148; | 1429 | 2487 | n/a | n/a | n/a |
| BATC01000005.1; | | | | | |
| 1167; 1168; 26/27 | | | | | |
| 585; 797049078; | 2269 | 3666 | 4536 | n/a | n/a |
| JZWX01001028.1; | | | | | |
| 1169; 1170; 25/26 | | | | | |
| 586; 893711364; | 1979 | 3244 | n/a | n/a | n/a |
| NZ_KQ236015.1; | | | | | |
| 1171; 1172; 21/22 | | | | | |
| 587; 327367349; | 1335 | 2361 | n/a | n/a | n/a |
| CP002599.1; | | | | | |
| 1173; 1174; 27/28 | | | | | |
| 588; 494022722; | 1539 | 3242 | n/a | n/a | n/a |
| NZ_CAVK010000217.1; | | | | | |
| 1175; 1176; 21/22 | | | | | |
| 589; 893711343; | 1457 | 2527 | n/a | n/a | n/a |
| NZ_KQ235994.1; | | | | | |
| 1177; 1178; 12/13 | | | | | |
| 590; 930473294; | 2278 | 3680 | 4540 | n/a | n/a |
| NZ_LJCV01000275.1; | | | | | |
| 1179; 1180; 36/37 | | | | | |
| 591; 514419386; | 1827 | 2894 | n/a | n/a | n/a |
| NZ_KE148338.1; | | | | | |
| 1181; 1182; 22/23 | | | | | |
| 592; 930473294; | 1472 | 2546 | 3888 | n/a | n/a |
| NZ_LJCV01000275.1; | | | | | |
| 1183; 1184; 36/37 | | | | | |
| 593; 893711364; | 1521 | 2607 | n/a | n/a | n/a |
| NZ_KQ236015.1; | | | | | |
| 1185; 1186; 21/22 | | | | | |
| 594; 483682977; | 1700 | 2852 | 4483 | n/a | n/a |
| NZ_KB904636.1; | | | | | |
| 1187; 1188; 29/30 | | | | | |
| 595; 893711364; | 1546 | 2637 | n/a | n/a | n/a |
| NZ_KQ236015.1; | | | | | |
| 1189; 1190; 21/22 | | | | | |
| 596; 914607448; | 2148 | 3539 | n/a | n/a | n/a |
| NZ_JYNE01000028.1; | | | | | |
| 1191; 1192; 22/23 | | | | | |
| 597; 753809381; | n/a | 2967 | n/a | n/a | n/a |
| NZ_CP006850.1; | | | | | |
| 1193; 1194; 23/24 | | | | | |
| 598; 759941310; | n/a | n/a | n/a | 3608 | n/a |
| NZ_JOAG01000020.1; | | | | | |
| 1195; 1196; 30/31 | | | | | |
| 599; 484023808; | n/a | 2833 | 4092 | n/a | n/a |
| NZ_ANBF01000204.1; | | | | | |
| 1197; 1198; 22/23 | | | | | |
| 600; 763095630; | 2067 | 3405 | n/a | n/a | n/a |
| NZ_JXZE01000009.1; | | | | | |
| 1199; 1200; 23/24 | | | | | |
| 601; 797049078; | 1471 | 2543 | 3886 | n/a | n/a |
| JZWX01001028.1; | | | | | |
| 1201; 1202; 25/26 | | | | | |
| 602; 663818579; | 1867 | 3095 | n/a | n/a | n/a |
| NZ_JNAC01000042.1; | | | | | |
| 1203; 1204; 23/24 | | | | | |
| 603; 541476958; | 1414 | 2468 | 3846 | n/a | n/a |
| AWSB01000006.1; | | | | | |
| 1205; 1206; 58/59 | | | | | |
| 604; 663300941; | 1857 | 3083 | 4253 | n/a | n/a |
| NZ_JNZY01000037.1; | | | | | |
| 1207; 1208; 25/26 | | | | | |
| 605; 196476886; | 1325 | 2350 | n/a | n/a | n/a |
| CP000747.1; | | | | | |
| 1209; 1210; 23/24 | | | | | |
| 606; 797049078; | 1455 | 2524 | 3872 | n/a | n/a |
| JZWX01001028.1; | | | | | |
| 1211; 1212; 25/26 | | | | | |
| 607; 402821166; | 1555 | 2645 | n/a | n/a | n/a |
| NZ_ALVC01000003.1; | | | | | |
| 1213; 1214; 23/24 | | | | | |
| 608; 763095630; | 1451 | 2515 | n/a | n/a | n/a |
| NZ_JXZE01000009.1; | | | | | |
| 1215; 1216; 23/24 | | | | | |
| 609; 483996974; | 1675 | 2817 | n/a | n/a | n/a |
| NZ_AMYX01000026.1; | | | | | |
| 1217; 1218; 21/22 | | | | | |
| 610; 759944490; | 2062 | 3610 | 4411 | n/a | n/a |
| NZ_JOAG01000030.1; | | | | | |
| 1219; 1220; 26/27 | | | | | |
| 611; 269095543; | 1327 | 2352 | 3764 | n/a | n/a |
| CP001819.1; | | | | | |
| 1221; 1222; 13/14 | | | | | |
| 612; 393773868; | 2060 | 2647 | n/a | n/a | n/a |
| NZ_AKFJ01000097.1; | | | | | |
| 1223; 1224; 18/19 | | | | | |
| 613; 765344939; | 1982 | 2657 | n/a | n/a | n/a |
| NZ_CP010954.1; | | | | | |
| 1225; 1226; 22/23 | | | | | |
| 614; 873296295; | n/a | 3490 | n/a | n/a | n/a |
| NZ_LECE01000071.1; | | | | | |
| 1227; 1228; 23/24 | | | | | |
| 615; 759431957; | 2053 | 3388 | n/a | n/a | n/a |
| NZ_JEMV01000094.1; | | | | | |
| 1229; 1230; 12/13 | | | | | |
| 616; 765344939; | 2076 | 3421 | n/a | n/a | n/a |
| NZ_CP010954.1; | | | | | |
| 1231; 1232; 22/23 | | | | | |
| 617; 262193326; | 1603 | 2703 | n/a | n/a | n/a |
| NC_013440.1; | | | | | |
| 1233; 1234; 24/25 | | | | | |
| 618; 329889017; | 1508 | 2591 | n/a | n/a | n/a |
| NZ_GL883086.1; | | | | | |
| 1235; 1236; 19/20 | | | | | |
| 619; 664428976; | 1854 | 3116 | 4250 | n/a | n/a |
| NZ_KL585179.1; | | | | | |
| 1237; 1238; 21/22 | | | | | |
| 620; 764364074; | 2230 | 3407 | n/a | n/a | n/a |
| NZ_CP010836.1; | | | | | |
| 1239; 1240; 22/23 | | | | | |
| 621; 764364074; | 2230 | 3407 | n/a | n/a | n/a |
| NZ_CP010836.1; | | | | | |
| 1241; 1242; 19/20 | | | | | |
| 622; 402821307; | 2183 | 3219 | n/a | n/a | n/a |
| NZ_ALVC01000008.1; | | | | | |
| 1243; 1244; 12/13 | | | | | |
| 623; 484115568; | 1775 | 2985 | n/a | n/a | n/a |
| NZ_BACX01000797.1; | | | | | |
| 1245; 1246; 22/23 | | | | | |
| 624; 402821307; | 1556 | 2646 | n/a | n/a | n/a |
| NZ_ALVC01000008.1; | | | | | |
| 1247; 1248; 12/13 | | | | | |
| 625; 386845069; | 1633 | 3599 | 4037 | n/a | n/a |
| NC_017803.1; | | | | | |
| 1249; 1250; 22/23 | | | | | |
| 626; 386845069; | 1339 | 2366 | 3773 | n/a | n/a |
| NC_017803.1; | | | | | |
| 1251; 1252; 22/23 | | | | | |
| 627; 347526385; | n/a | 2742 | n/a | n/a | n/a |
| NC_015976.1; | | | | | |
| 1253; 1254; 12/13 | | | | | |
| 628; 696542396; | 2207 | 3163 | n/a | n/a | n/a |
| NZ_JQFJ01000002.1; | | | | | |
| 1255; 1256; 20/21 | | | | | |
| 629; 702914619; | 1926 | 3168 | 4312 | n/a | n/a |
| NZ_JNXI01000006.1; | | | | | |
| 1257; 1258; 25/26 | | | | | |
| 630; 602262270; | 1427 | 2484 | 3857 | n/a | n/a |
| JENI01000029.1; | | | | | |
| 1259; 1260; 21/22 | | | | | |
| 631; 739629085; | 1976 | 3241 | n/a | n/a | n/a |
| NZ_JFYY01000016.1; | | | | | |
| 1261; 1262; 23/24 | | | | | |
| 632; 602262270; | 1956 | 3213 | 3980 | n/a | n/a |
| JENI01000029.1; | | | | | |
| 1263; 1264; 21/22 | | | | | |
| 633; 602262270; | n/a | 2683 | 3980 | n/a | n/a |
| JENI01000029.1; | | | | | |
| 1265; 1266; 21/22 | | | | | |
| 634; 602262270; | 1421 | 2476 | 3852 | n/a | n/a |
| JENI01000029.1; | | | | | |
| 1267; 1268; 21/22 | | | | | |
| 635; 659889283; | 1844 | 3253 | n/a | n/a | n/a |
| NZ_JOOE01000001.1; | | | | | |
| 1269; 1270; 18/19 | | | | | |
| 636; 737322991; | 2201 | 3196 | n/a | n/a | n/a |
| NZ_JMQR01000005.1; | | | | | |
| 1271; 1272; 19/20 | | | | | |
| 637; 444405902; | 1509 | 2592 | n/a | n/a | n/a |
| NZ_KB291784.1; | | | | | |
| 1273; 1274; 20/21 | | | | | |
| 638; 444405902; | 1509 | 2592 | n/a | n/a | n/a |
| NZ_KB291784.1; | | | | | |
| 1275; 1276; 20/21 | | | | | |
| 639; 602262270; | 1956 | 3210 | 3980 | n/a | n/a |
| JENI01000029.1; | | | | | |
| 1277; 1278; 21/22 | | | | | |
| 640; 546154317; | 1415 | 2469 | 3847 | n/a | n/a |
| NZ_ACVN02000045.1; | | | | | |
| 1279; 1280; 18/19 | | | | | |
| 641; 602262270; | 1956 | 3212 | 4333 | n/a | n/a |
| JENI01000029.1; | | | | | |
| 1281; 1282; 21/22 | | | | | |
| 642; 938956730; | 2284 | 3693 | n/a | n/a | n/a |
| NZ_CP009429.1; | | | | | |
| 1283; 1284; 20/21 | | | | | |
| 643; 602262270; | 1439 | 2501 | 3862 | n/a | n/a |
| JENI01000029.1; | | | | | |
| 1285; 1286; 21/22 | | | | | |
| 644; 737323704; | n/a | 3197 | n/a | n/a | n/a |
| NZ_JMQR01000012.1; | | | | | |
| 1287; 1288; 19/20 | | | | | |
| 645; 737323704; | n/a | 3197 | n/a | n/a | n/a |
| NZ_JMQR01000012.1; | | | | | |
| 1289; 1290; 18/19 | | | | | |
| 646; 602262270; | 1441 | 2503 | 3863 | n/a | n/a |
| JENI01000029.1; | | | | | |
| 1291; 1292; 21/22 | | | | | |
| 647; 657605746; | 1836 | 3067 | n/a | n/a | n/a |
| NZ_JNIX01000010.1; | | | | | |
| 1293; 1294; 18/19 | | | | | |
| 648; 647728918; | 1774 | 2980 | n/a | n/a | n/a |
| NZ_JHOF01000018.1; | | | | | |
| 1295; 1296; 19/20 | | | | | |
| 649; 938989745; | 2288 | 3697 | n/a | n/a | n/a |
| NZ_CP012897.1; | | | | | |
| 1297; 1298; 20/21 | | | | | |
| 650; 938989745; | 2288 | 3697 | n/a | n/a | n/a |
| NZ_CP012897.1; | | | | | |
| 1299; 1300; 19/20 | | | | | |
| 651; 664434000; | n/a | 3118 | n/a | n/a | n/a |
| NZ_JOIA01001078.1; | | | | | |
| 1301; 1302; 21/22 | | | | | |
| 652; 703243990; | n/a | 3588 | n/a | n/a | n/a |
| NZ_JNYM01001430.1; | | | | | |
| 1303; 1304; 20/21 | | | | | |
| 653; 739699072; | 1983 | 3248 | n/a | n/a | n/a |
| NZ_JNFC01000001.1; | | | | | |
| 1305; 1306; 19/20 | | | | | |
| 654; 739699072; | 1983 | 3248 | n/a | n/a | n/a |
| NZ_JNFC01000001.1; | | | | | |
| 1307; 1308; 19/20 | | | | | |
| 655; 739699072; | 1983 | 3319 | n/a | n/a | n/a |
| NZ_JNFC01000001.1; | | | | | |
| 1309; 1310; 19/20 | | | | | |
| 656; 739699072; | 1983 | 3319 | n/a | n/a | n/a |
| NZ_JNFC01000001.1; | | | | | |
| 1311; 1312; 19/20 | | | | | |
| 657; 343957487; | 1573 | 2662 | n/a | n/a | n/a |
| NZ_AEWF01000005.1; | | | | | |
| 1313; 1314; 31/32 | | | | | |
| 658; 343957487; | 1573 | 2662 | n/a | n/a | n/a |
| NZ_AEWF01000005.1; | | | | | |
| 1315; 1316; 31/32 | | | | | |
| 659; 938154362; | 1364 | 2401 | n/a | n/a | n/a |
| CP009430.1; | | | | | |
| 1317; 1318; 23/24 | | | | | |
| 660; 566155502; | 1746 | 2914 | 4151 | n/a | n/a |
| NZ_CM002285.1; | | | | | |
| 1319; 1320; 37/38 | | | | | |
| 661; 399903251; | n/a | 2453 | 3834 | n/a | n/a |
| ALJK01000024.1; | | | | | |
| 1321; 1322; 22/23 | | | | | |
| 662; 399903251; | n/a | 2453 | 3834 | n/a | n/a |
| ALJK01000024.1; | | | | | |
| 1323; 1324; 21/22 | | | | | |
| 663; 399903251; | n/a | 2453 | 3834 | n/a | n/a |
| ALJK01000024.1; | | | | | |
| 1325; 1326; 24/25 | | | | | |
| 664; 763097360; | 2229 | 3617 | n/a | n/a | n/a |
| NZ_JXZE01000017.1; | | | | | |
| 1327; 1328; 21/22 | | | | | |
| 665; 746290581; | 2218 | 3595 | n/a | n/a | n/a |
| NZ_JRVC01000028.1; | | | | | |
| 1329; 1330; 22/23 | | | | | |
| 666; 739287390; | 2206 | 3137 | 4303 | n/a | n/a |
| NZ_JMFA01000010.1; | | | | | |
| 1331; 1332; 21/22 | | | | | |
| 667; 694033726; | 2206 | 3137 | 4303 | n/a | n/a |
| NZ_JMEM01000016.1; | | | | | |
| 1333; 1334; 21/22 | | | | | |
| 668; 739287390; | 2206 | 3137 | 4303 | n/a | n/a |
| NZ_JMFA01000010.1; | | | | | |
| 1335; 1336; 21/22 | | | | | |
| 669; 483997957; | 1677 | 2819 | n/a | n/a | n/a |
| NZ_AMYY01000002.1; | | | | | |
| 1337; 1338; 20/21 | | | | | |
| 670; 898301838; | n/a | 3510 | n/a | n/a | n/a |
| NZ_LAVK01000307.1; | | | | | |
| 1339; 1340; 36/37 | | | | | |
| 671; 739287390; | 2205 | 3138 | 4303 | n/a | n/a |
| NZ_JMFA01000010.1; | | | | | |
| 1341; 1342; 21/22 | | | | | |
| 672; 739287390; | 2205 | 3138 | 4303 | n/a | n/a |
| NZ_JMFA01000010.1; | | | | | |
| 1343; 1344; 21/22 | | | | | |
| 673; 739287390; | 2205 | 3138 | 4303 | n/a | n/a |
| NZ_JMFA01000010.1; | | | | | |
| 1345; 1346; 21/22 | | | | | |
| 674; 739287390; | 2205 | 3230 | 4303 | n/a | n/a |
| NZ_JMFA01000010.1; | | | | | |
| 1347; 1348; 21/22 | | | | | |
| 675; 739287390; | 2205 | 3230 | 4303 | n/a | n/a |
| NZ_JMFA01000010.1; | | | | | |
| 1349; 1350; 21/22 | | | | | |
| 676; 739287390; | 2205 | 3230 | 4303 | n/a | n/a |
| NZ_JMFA01000010.1; | | | | | |
| 1351; 1352; 21/22 | | | | | |
| 677; 766589647; | 1754 | 2950 | 4166 | n/a | n/a |
| NZ_CEHJ01000007.1; | | | | | |
| 1353; 1354; 18/19 | | | | | |
| 678; 938989745; | 2289 | 3698 | n/a | n/a | n/a |
| NZ_CP012897.1; | | | | | |
| 1355; 1356; 20/21 | | | | | |
| 679; 938989745; | 2289 | 3698 | n/a | n/a | n/a |
| NZ_CP012897.1; | | | | | |
| 1357; 1358; 20/21 | | | | | |
| 680; 739610197; | 1974 | 3238 | n/a | n/a | n/a |
| NZ_JFZA02000028.1; | | | | | |
| 1359; 1360; 22/23 | | | | | |
| 681; 766589647; | 2081 | 3430 | 4423 | n/a | n/a |
| NZ_CEHJ01000007.1; | | | | | |
| 1361; 1362; 18/19 | | | | | |
| 682; 896667361; | 2130 | 3509 | 4468 | n/a | n/a |
| NZ_JVGV01000030.1; | | | | | |
| 1363; 1364; 18/19 | | | | | |
| 683; 834156795; | 1435 | 2496 | n/a | n/a | n/a |
| BBRO01000001.1; | | | | | |
| 1365; 1366; 20/21 | | | | | |
| 684; 736736050; | 2184 | 3561 | n/a | n/a | n/a |
| NZ_AWFG01000029.1; | | | | | |
| 1367; 1368; 27/28 | | | | | |
| 685; 766589647; | 1754 | 3424 | 4166 | n/a | n/a |
| NZ_CEHJ01000007.1; | | | | | |
| 1369; 1370; 18/19 | | | | | |
| 686; 938956730; | 1363 | 2400 | n/a | n/a | n/a |
| NZ_CP009429.1; | | | | | |
| 1371; 1372; 19/20 | | | | | |
| 687; 938956730; | 1363 | 2400 | n/a | n/a | n/a |
| NZ_CP009429.1; | | | | | |
| 1373; 1374; 21/22 | | | | | |
| 688; 545327527; | n/a | 2893 | 4376 | n/a | n/a |
| NZ_KE951412.1; | | | | | |
| 1375; 1376; 25/26 | | | | | |
| 689; 545327527; | n/a | 2893 | 4376 | n/a | n/a |
| NZ_KE951412.1; | | | | | |
| 1377; 1378; 13/14 | | | | | |
| 690; 545327527; | n/a | 2893 | 4376 | n/a | n/a |
| NZ_KE951412.1; | | | | | |
| 1379; 1380; 19/20 | | | | | |
| 691; 545327527; | n/a | 2893 | 4376 | n/a | n/a |
| NZ_KE951412.1; | | | | | |
| 1381; 1382; 19/20 | | | | | |
| 692; 541473965; | n/a | 2893 | 4376 | n/a | n/a |
| AWSB01000041.1; | | | | | |
| 1383; 1384; 20/21 | | | | | |
| 693; 896567682; | 2128 | 3507 | n/a | n/a | n/a |
| NZ_JUMH01000022.1; | | | | | |
| 1385; 1386; 16/17 | | | | | |
| 694; 728827031; | 2210 | 3178 | n/a | n/a | n/a |
| NZ_JROG01000008.1; | | | | | |
| 1387; 1388; 20/21 | | | | | |
| 695; 896567682; | 2126 | 3502 | n/a | n/a | n/a |
| NZ_JUMH01000022.1; | | | | | |
| 1389; 1390; 16/17 | | | | | |
| 696; 896567682; | 1914 | 3136 | n/a | n/a | n/a |
| NZ_JUMH01000022.1; | | | | | |
| 1391; 1392; 16/17 | | | | | |
| 697; 387783149; | 2035 | 2752 | 4036 | n/a | n/a |
| NC_017595.1; | | | | | |
| 1393; 1394; 18/19 | | | | | |
| 698; 484021228; | 2156 | 2860 | n/a | n/a | n/a |
| NZ_KB895788.1; | | | | | |
| 1395; 1396; 21/22 | | | | | |
| 699; 269095543; | n/a | 3379 | 3997 | n/a | n/a |
| CP001819.1; | | | | | |
| 1397; 1398; 13/14 | | | | | |
| 700; 663372947; | n/a | 3087 | n/a | n/a | n/a |
| NZ_JOFL01000031.1; | | | | | |
| 1399; 1400; 32/33 | | | | | |
| 701; 692233141; | 1913 | 3135 | n/a | n/a | n/a |
| NZ_JQAK01000001.1; | | | | | |
| 1401; 1402; 24/25 | | | | | |
| 702; 692233141; | 1913 | 3135 | n/a | n/a | n/a |
| NZ_JQAK01000001.1; | | | | | |
| 1403; 1404; 24/25 | | | | | |
| 703; 896520167; | 2127 | 3504 | n/a | n/a | n/a |
| NZ_JVUI01000038.1; | | | | | |
| 1405; 1406; 16/17 | | | | | |
| 704; 194363778; | 1600 | 2699 | n/a | n/a | n/a |
| NC_011071.1; | | | | | |
| 1407; 1408; 36/37 | | | | | |
| 705; 737569369; | 1950 | 3204 | n/a | n/a | n/a |
| NZ_ARYL01000059.1; | | | | | |
| 1409; 1410; 27/28 | | | | | |
| 706; 484033611; | 1686 | 2836 | n/a | n/a | n/a |
| NZ_ANFZ01000008.1; | | | | | |
| 1411; 1412; 20/21 | | | | | |
| 707; 780834515; | n/a | 2522 | n/a | n/a | n/a |
| LADU01000087.1; | | | | | |
| 1413; 1414; 27/28 | | | | | |
| 708; 927084736; | 2268 | 3665 | 4535 | n/a | n/a |
| NZ_LITU01000056.1; | | | | | |
| 1415; 1416; 21/22 | | | | | |
| 709; 522837181; | 1406 | 2460 | 3839 | n/a | n/a |
| NZ_KE352807.1; | | | | | |
| 1417; 1418; 22/23 | | | | | |
| 710; 737569369; | 1938 | 3186 | n/a | n/a | n/a |
| NZ_ARYL01000059.1; | | | | | |
| 1419; 1420; 27/28 | | | | | |
| 711; 737577234; | 1952 | 3206 | n/a | n/a | n/a |
| NZ_AWFH01000002.1; | | | | | |
| 1421; 1422; 27/28 | | | | | |
| 712; 522837181; | 1405 | 2459 | 3838 | n/a | n/a |
| NZ_KE352807.1; | | | | | |
| 1423; 1424; 22/23 | | | | | |
| 713; 522837181; | 1505 | 2587 | 3918 | n/a | n/a |
| NZ_KE352807.1; | | | | | |
| 1425; 1426; 22/23 | | | | | |
| 714; 522837181; | 1504 | 2963 | 3918 | n/a | n/a |
| NZ_KE352807.1; | | | | | |
| 1427; 1428; 22/23 | | | | | |
| 715; 522837181; | 1410 | 2464 | 3842 | n/a | n/a |
| NZ_KE352807.1; | | | | | |
| 1429; 1430; 22/23 | | | | | |
| 716; 522837181; | n/a | 2454 | 3835 | n/a | n/a |
| NZ_KE352807.1; | | | | | |
| 1431; 1432; 22/23 | | | | | |
| 717; 522837181; | n/a | 2964 | 3918 | n/a | n/a |
| NZ_KE352807.1; | | | | | |
| 1433; 1434; 22/23 | | | | | |
| 718; 522837181; | 1763 | 2962 | 3918 | n/a | n/a |
| NZ_KE352807.1; | | | | | |
| 1435; 1436; 22/23 | | | | | |
| 719; 522837181; | 1503 | 2586 | 3918 | n/a | n/a |
| NZ_KE352807.1; | | | | | |
| 1437; 1438; 22/23 | | | | | |
| 720; 522837181; | 1372 | 2415 | 3810 | n/a | n/a |
| NZ_KE352807.1; | | | | | |
| 1439; 1440; 22/23 | | | | | |
| 721; 522837181; | n/a | 2439 | 3827 | n/a | n/a |
| NZ_KE352807.1; | | | | | |
| 1441; 1442; 22/23 | | | | | |
| 722; 822535978; | 2097 | 3462 | n/a | n/a | n/a |
| NZ_JPLE01000028.1; | | | | | |
| 1443; 1444; 35/36 | | | | | |
| 723; 924898949; | 1360 | 2395 | n/a | n/a | n/a |
| NZ_CP009452.1; | | | | | |
| 1445; 1446; 18/19 | | | | | |
| 724; 924516300; | 2252 | 3643 | n/a | n/a | n/a |
| NZ_LDVR01000003.1; | | | | | |
| 1447; 1448; 36/37 | | | | | |
| 725; 541473965; | 1413 | 2467 | 3845 | n/a | n/a |
| AWSB01000041.1; | | | | | |
| 1449; 1450; 20/21 | | | | | |
| 726; 483532492; | 1710 | n/a | n/a | n/a | n/a |
| NZ_BARE01000100.1; | | | | | |
| 1451; 1452; 19/20 | | | | | |
| 727; 655095554; | 1824 | 3224 | 4219 | n/a | n/a |
| NZ_AULE01000001.1; | | | | | |
| 1453; 1454; 22/23 | | | | | |
| 728; 541473965; | n/a | 2893 | 4376 | n/a | n/a |
| AWSB01000041.1; | | | | | |
| 1455; 1456; 20/21 | | | | | |
| 729; 545327527; | n/a | 2893 | 4376 | n/a | n/a |
| NZ_KE951412.1; | | | | | |
| 1457; 1458; 20/21 | | | | | |
| 730; 545327527; | n/a | 2893 | 4376 | n/a | n/a |
| NZ_KE951412.1; | | | | | |
| 1459; 1460; 13/14 | | | | | |
| 731; 545327527; | n/a | 2893 | 4376 | n/a | n/a |
| NZ_KE951412.1; | | | | | |
| 1461; 1462; 20/21 | | | | | |
| 732; 651445346; | n/a | 2994 | 4188 | n/a | n/a |
| NZ_AZVC01000006.1; | | | | | |
| 1463; 1464; 21/22 | | | | | |
| 733; 739650776; | 2208 | 3243 | n/a | n/a | n/a |
| NZ_KL662193.1; | | | | | |
| 1465; 1466; 29/30 | | | | | |
| 734; 260447107; | 1559 | 2651 | 3957 | n/a | n/a |
| NZ_GG703879.1; | | | | | |
| 1467; 1468; 13/14 | | | | | |
| 735; 260447107; | 1559 | 2651 | 3957 | n/a | n/a |
| NZ_GG703879.1; | | | | | |
| 1469; 1470; 20/21 | | | | | |
| 736; 260447107; | 1559 | 2651 | 3957 | n/a | n/a |
| NZ_GG703879.1; | | | | | |
| 1471; 1472; 20/21 | | | | | |
| 737; 260447107; | 1559 | 2651 | 3957 | n/a | n/a |
| NZ_GG703879.1; | | | | | |
| 1473; 1474; 20/21 | | | | | |
| 738; 260447107; | 1559 | 2651 | 3957 | n/a | n/a |
| NZ_GG703879.1; | | | | | |
| 1475; 1476; 20/21 | | | | | |
| 739; 737567115; | 1949 | 3203 | n/a | n/a | n/a |
| NZ_ARYL01000020.1; | | | | | |
| 1477; 1478; 26/27 | | | | | |
| 740; 343957487; | 1572 | 2661 | n/a | n/a | n/a |
| NZ_AEWF01000005.1; | | | | | |
| 1479; 1480; 29/30 | | | | | |
| 741; 528200987; | n/a | 3560 | 4135 | n/a | n/a |
| ATMS01000061.1; | | | | | |
| 1481; 1482; 22/23 | | | | | |
| 742; 896535166; | 1579 | 3505 | n/a | n/a | n/a |
| NZ_JVHW01000017.1; | | | | | |
| 1483; 1484; 33/34 | | | | | |
| 743; 896535166; | 2129 | 3508 | n/a | n/a | n/a |
| NZ_JVHW01000017.1; | | | | | |
| 1485; 1486; 33/34 | | | | | |
| 744; 896535166; | 1579 | 3503 | n/a | n/a | n/a |
| NZ_JVHW01000017.1; | | | | | |
| 1487; 1488; 33/34 | | | | | |
| 745; 730274767; | 2216 | 3179 | n/a | n/a | n/a |
| NZ_JSBN01000149.1; | | | | | |
| 1489; 1490; 22/23 | | | | | |
| 746; 896555871; | 1579 | 3506 | n/a | n/a | n/a |
| NZ_JVRD01000056.1; | | | | | |
| 1491; 1492; 33/34 | | | | | |
| 747; 740097110; | 1994 | 3273 | 4359 | n/a | n/a |
| NZ_JABQ01000001.1; | | | | | |
| 1493; 1494; 48/49 | | | | | |
| 748; 930169273; | 2129 | 3679 | n/a | n/a | n/a |
| NZ_LJJH01000098.1; | | | | | |
| 1495; 1496; 33/34 | | | | | |
| 749; 923067758; | 2250 | 3640 | n/a | n/a | n/a |
| NZ_CP011010.1; | | | | | |
| 1497; 1498; 33/34 | | | | | |
| 750; 484978121; | 1841 | 2866 | n/a | n/a | n/a |
| NZ_AGRB01000040.1; | | | | | |
| 1499; 1500; 33/34 | | | | | |
| 751; 664275807; | n/a | 3573 | 4280 | n/a | n/a |
| NZ_JOIX01000031.1; | | | | | |
| 1501; 1502; 39/40 | | | | | |
| 752; 737580759; | 1953 | 3207 | n/a | n/a | n/a |
| NZ_AWFH01000021.1; | | | | | |
| 1503; 1504; 31/32 | | | | | |
| 753; 484978121; | 2249 | 3639 | n/a | n/a | n/a |
| NZ_AGRB01000040.1; | | | | | |
| 1505; 1506; 33/34 | | | | | |
| 754; 896535166; | 1579 | 2667 | n/a | n/a | n/a |
| NZ_JVHW01000017.1; | | | | | |
| 1507; 1508; 33/34 | | | | | |
| 755; 896535166; | 1579 | 3395 | n/a | n/a | n/a |
| NZ_JVHW01000017.1; | | | | | |
| 1509; 1510; 33/34 | | | | | |
| 756; 434402184; | 2027 | 2766 | 4386 | n/a | n/a |
| NC_019757.1; | | | | | |
| 1511; 1512; 27/28 | | | | | |
| 757; 522837181; | n/a | 2440 | 3828 | n/a | n/a |
| NZ_KE352807.1; | | | | | |
| 1513; 1514; 22/23 | | | | | |
| 758; 640451877; | 1759 | 2959 | n/a | n/a | n/a |
| NZ_AYSW01000160.1; | | | | | |
| 1515; 1516; 13/14 | | | | | |
| 759; 640451877; | 1759 | 2959 | n/a | n/a | n/a |
| NZ_AYSW01000160.1; | | | | | |
| 1517; 1518; 17/18 | | | | | |
| 760; 640451877; | 1759 | 2959 | n/a | n/a | n/a |
| NZ_AYSW01000160.1; | | | | | |
| 1519; 1520; 16/17 | | | | | |
| 761; 528200987; | 1411 | 2465 | 3843 | n/a | n/a |
| ATMS01000061.1; | | | | | |
| 1521; 1522; 22/23 | | | | | |
| 762; 780821511; | n/a | 2521 | n/a | n/a | n/a |
| LADW01000068.1; | | | | | |
| 1523; 1524; 24/25 | | | | | |
| 763; 566231608; | 1423 | 2478 | 3854 | n/a | n/a |
| AZMH01000257.1; | | | | | |
| 1525; 1526; 19/20 | | | | | |
| 764; 736764136; | 1940 | 3188 | n/a | n/a | n/a |
| NZ_AWFD01000033.1; | | | | | |
| 1527; 1528; 27/28 | | | | | |
| 765; 737608363; | 1954 | 3208 | n/a | n/a | n/a |
| NZ_ARYJ01000002.1; | | | | | |
| 1529; 1530; 17/18 | | | | | |
| 766; 145690656; | 1322 | 2344 | n/a | n/a | n/a |
| CP000408.1; | | | | | |
| 1531; 1532; 19/20 | | | | | |
| 767; 145690656; | 1322 | 2344 | n/a | n/a | n/a |
| CP000408.1; | | | | | |
| 1533; 1534; 19/20 | | | | | |
| 768; 815863894; | n/a | 3453 | 4436 | n/a | n/a |
| NZ_LAJC01000044.1; | | | | | |
| 1535; 1536; 13/14 | | | | | |
| 769; 145690656; | 1371 | 2413 | 3808 | n/a | n/a |
| CP000408.1; | | | | | |
| 1537; 1538; 19/20 | | | | | |
| 770; 145690656; | 1371 | 2413 | 3808 | n/a | n/a |
| CP000408.1; | | | | | |
| 1539; 1540; 19/20 | | | | | |
| 771; 550281965; | 1416 | 2470 | 3848 | n/a | n/a |
| NZ_ASSJ01000070.1; | | | | | |
| 1541; 1542; 27/28 | | | | | |
| 772; 484113491; | 1731 | 2896 | n/a | n/a | n/a |
| NZ_BACX01000258.1; | | | | | |
| 1543; 1544; 10/11 | | | | | |
| 773; 145690656; | 1592 | 2949 | 3994 | n/a | n/a |
| CP000408.1; | | | | | |
| 1545; 1546; 19/20 | | | | | |
| 774; 145690656; | 1592 | 2949 | 3994 | n/a | n/a |
| CP000408.1; | | | | | |
| 1547; 1548; 19/20 | | | | | |
| 775; 483258918; | 2077 | 3422 | 4419 | n/a | n/a |
| NZ_AMFE01000033.1; | | | | | |
| 1549; 1550; 19/20 | | | | | |
| 776; 483258918; | 2077 | 3422 | 4419 | n/a | n/a |
| NZ_AMFE01000033.1; | | | | | |
| 1551; 1552; 19/20 | | | | | |
| 777; 145690656; | n/a | 2345 | n/a | n/a | n/a |
| CP000408.1; | | | | | |
| 1553; 1554; 19/20 | | | | | |
| 778; 145690656; | n/a | 2345 | n/a | n/a | n/a |
| CP000408.1; | | | | | |
| 1555; 1556; 19/20 | | | | | |
| 779; 483258918; | 2078 | 3425 | 4419 | n/a | n/a |
| NZ_AMFE01000033.1; | | | | | |
| 1557; 1558; 19/20 | | | | | |
| 780; 766595491; | 2078 | 3425 | 4419 | n/a | n/a |
| NZ_CEHM01000004.1; | | | | | |
| 1559; 1560; 19/20 | | | | | |
| 781; 737951550; | 1959 | 3562 | 4334 | n/a | n/a |
| NZ_IAAG01000075.1; | | | | | |
| 1561; 1562; 19/20 | | | | | |
| 782; 879201007; | 1483 | 2557 | 3907 | n/a | n/a |
| CKIK01000005.1; | | | | | |
| 1563; 1564; 19/20 | | | | | |
| 783; 879201007; | 1484 | 3523 | 3907 | n/a | n/a |
| CKIK01000005.1; | | | | | |
| 1565; 1566; 19/20 | | | | | |
| 784; 879201007; | 1483 | 3684 | 3907 | n/a | n/a |
| CKIK01000005.1; | | | | | |
| 1567; 1568; 19/20 | | | | | |
| 785; 879201007; | 1484 | 3524 | 3907 | n/a | n/a |
| CKIK01000005.1; 1 | | | | | |
| 569; 1570; 19/20 | | | | | |
| 786; 879201007; | 1484 | 2558 | 3907 | n/a | n/a |
| CKIK01000005.1; | | | | | |
| 1571; 1572; 19/20 | | | | | |
| 787; 483258918; | 1671 | 2812 | 4082 | n/a | n/a |
| NZ_AMFE01000033.1; | | | | | |
| 1573; 1574; 19/20 | | | | | |
| 788; 483258918; | 1671 | 2812 | 4082 | n/a | n/a |
| NZ_AMFE01000033.1; | | | | | |
| 1575; 1576; 19/20 | | | | | |
| 789; 879201007; | 1382 | 2430 | 3822 | n/a | n/a |
| CKIK01000005.1; | | | | | |
| 1577; 1578; 19/20 | | | | | |
| 790; 950938054; | 1381 | 2429 | 3821 | n/a | n/a |
| NZ_CIHL01000007.1; | | | | | |
| 1579; 1580; 19/20 | | | | | |
| 791; 739748927; | 1986 | 3254 | 4346 | n/a | n/a |
| NZ_JJMT01000011.1; | | | | | |
| 1581; 1582; 19/20 | | | | | |
| 792; 739748927; | 1986 | 3254 | 4346 | n/a | n/a |
| NZ_JJMT01000011.1; | | | | | |
| 1583; 1584; 19/20 | | | | | |
| 793; 655069822; | 1822 | 3044 | 4218 | n/a | n/a |
| NZ_KI912489.1; | | | | | |
| 1585; 1586; 19/20 | | | | | |
| 794; 655069822; | 1822 | 3044 | 4218 | n/a | n/a |
| NZ_KI912489.1; | | | | | |
| 1587; 1588; 19/20 | | | | | |
| 795; 655069822; | 1822 | 3044 | 4218 | n/a | n/a |
| NZ_KI912489.1; | | | | | |
| 1589; 1590; 19/20 | | | | | |
| 796; 655069822; | 1822 | 3044 | 4218 | n/a | n/a |
| NZ_KI912489.1; | | | | | |
| 1591; 1592; 19/20 | | | | | |
| 797; 655069822; | 1822 | 3044 | 4218 | n/a | n/a |
| NZ_KI912489.1; | | | | | |
| 1593; 1594; 19/20 | | | | | |
| 798; 655069822; | 1822 | 3044 | 4218 | n/a | n/a |
| NZ_KI912489.1; | | | | | |
| 1595; 1596; 19/20 | | | | | |
| 799; 664428976; | 1854 | 3116 | 4250 | n/a | n/a |
| NZ_KL585179.1; | | | | | |
| 1597; 1598; 21/22 | | | | | |
| 800; 325680876; | 1393 | 2444 | 3831 | n/a | n/a |
| NZ_ADKM02000123.1; | | | | | |
| 1599; 1600; 19/20 | | | | | |
| 801; 325680876; | 1507 | 3231 | 4344 | n/a | n/a |
| NZ_ADKM02000123.1; | | | | | |
| 1601; 1602; 19/20 | | | | | |
| 802; 759443001; | n/a | 3389 | 4405 | n/a | n/a |
| NZ_JDUV01000004.1; | | | | | |
| 1603; 1604; 20/21 | | | | | |
| 803; 759443001; | n/a | 3406 | 4405 | n/a | n/a |
| NZ_JDUV01000004.1; | | | | | |
| 1605; 1606; 20/21 | | | | | |
| 804; 551695014; | 1417 | 2471 | 3849 | n/a | n/a |
| AXZG01000035.1; | | | | | |
| 1607; 1608; 18/19 | | | | | |
| 805; 551695014; | 1417 | 2471 | 3849 | n/a | n/a |
| AXZG01000035.1; | | | | | |
| 1609; 1610; 9/10 | | | | | |
| 806; 818310996; | 1456 | 2526 | n/a | n/a | n/a |
| LBRK01000013.1; | | | | | |
| 1611; 1612; 29/30 | | | | | |
| 807; 213690928; | n/a | 2700 | 3992 | n/a | n/a |
| NC_011593.1; | | | | | |
| 1613; 1614; 20/21 | | | | | |
| 808; 383809261; | 1538 | 2628 | 4343 | n/a | n/a |
| NZ_AJJQ01000036.1; | | | | | |
| 1615; 1616; 18/19 | | | | | |
| 809; 383809261; | 1538 | 2628 | 4343 | n/a | n/a |
| NZ_AJJQ01000036.1; | | | | | |
| 1617; 1618; 9/10 | | | | | |
| 810; 551695014; | 1738 | 3233 | 4146 | n/a | n/a |
| AXZG01000035.1; | | | | | |
| 1619; 1620; 18/19 | | | | | |
| 811; 551695014; | 1738 | 3233 | 4146 | n/a | n/a |
| AXZG01000035.1; | | | | | |
| 1621; 1622; 9/10 | | | | | |
| 812; 484007841; | 1679 | 2823 | 4088 | n/a | n/a |
| NZ_ANAD01000138.1; | | | | | |
| 1623; 1624; 28/29 | | | | | |
| 813; 739372122; | 2204 | 3592 | 4343 | n/a | n/a |
| NZ_JQHE01000003.1; | | | | | |
| 1625; 1626; 11/12 | | | | | |
| 814; 739372122; | 2204 | 3592 | 4343 | n/a | n/a |
| NZ_JQHE01000003.1; | | | | | |
| 1627; 1628; 13/14 | | | | | |
| 815; 357386972; | 1627 | 2745 | n/a | n/a | n/a |
| NC_016109.1; | | | | | |
| 1629; 1630; 26/27 | | | | | |
| 816; 749295448; | n/a | 2965 | 4173 | n/a | n/a |
| NZ_CP006714.1; | | | | | |
| 1631; 1632; 20/21 | | | | | |
| 817; 260447107; | 1559 | 2651 | 3957 | n/a | n/a |
| NZ_GG703879.1; | | | | | |
| 1633; 1634; 20/21 | | | | | |
| 818; 260447107; | 1559 | 2651 | 3957 | n/a | n/a |
| NZ_GG703879.1; | | | | | |
| 1635; 1636; 13/14 | | | | | |
| 819; 260447107; | 1559 | 2651 | 3957 | n/a | n/a |
| NZ_GG703879.1; | | | | | |
| 1637; 1638; 20/21 | | | | | |
| 820; 260447107; | 1559 | 2651 | 3957 | n/a | n/a |
| NZ_GG703879.1; | | | | | |
| 1639; 1640; 20/21 | | | | | |
| 821; 260447107; | 1559 | 2651 | 3957 | n/a | n/a |
| NZ_GG703879.1; | | | | | |
| 1641; 1642; 20/21 | | | | | |
| 822; 749295448; | n/a | 2397 | 3797 | n/a | n/a |
| NZ_CP006714.1; | | | | | |
| 1643; 1644; 20/21 | | | | | |
| 823; 759443001; | 1442 | n/a | n/a | 2504 | n/a |
| NZ_JDUV01000004.1; | | | | | |
| 1645; 1646; 20/21 | | | | | |
| 824; 67639376; | 1460 | 2531 | n/a | n/a | n/a |
| NZ_AAHO01000116.1; | | | | | |
| 1647; 1648; 28/29 | | | | | |
| 825; 483969755; | 1703 | 2857 | n/a | n/a | n/a |
| NZ_KB891596.1; | | | | | |
| 1649; 1650; 34/35 | | | | | |
| 826; 484026206; | 1684 | 3337 | 4094 | n/a | n/a |
| NZ_ANBH01000093.1; | | | | | |
| 1651; 1652; 31/32 | | | | | |
| 827; 919546672; | n/a | 3630 | n/a | n/a | n/a |
| NZ_JOEL01000066.1; | | | | | |
| 1653; 1654; 31/32 | | | | | |
| 828; 486399859; | 2160 | 2885 | 4130 | n/a | n/a |
| NZ_KB912942.1; | | | | | |
| 1655; 1656; 24/25 | | | | | |
| 829; 815864238; | n/a | 3623 | 4437 | n/a | n/a |
| NZ_LAJC01000053.1; | | | | | |
| 1657; 1658; 22/23 | | | | | |
| 830; 879201007; | 1380 | 2427 | 3820 | n/a | n/a |
| CKIK01000005.1; | | | | | |
| 1659; 1660; 19/20 | | | | | |
| 831; 655414006; | n/a | 3053 | n/a | n/a | 4225 |
| NZ_AUBE01000007.1; | | | | | |
| 1661; 1662; 57/58 | | | | | |
| 832; 749611130; | 2225 | 3331 | n/a | n/a | n/a |
| NZ_CDHL01000044.1; | | | | | |
| 1663; 1664; 22/23 | | | | | |
| 833; 664084661; | 1849 | 3535 | 4480 | n/a | n/a |
| NZ_JOED01000001.1; | | | | | |
| 1665; 1666; 33/34 | | | | | |
| 834; 256374160; | 1650 | 2778 | n/a | n/a | n/a |
| NC_013093.1; | | | | | |
| 1667; 1668; 40/41 | | | | | |
| 835; 822214995; | n/a | 3459 | n/a | n/a | n/a |
| NZ_CP007699.1; | | | | | |
| 1669; 1670; 73/74 | | | | | |
| 836; 664084661; | 1849 | 3533 | 4479 | n/a | n/a |
| NZ_JOED01000001.1; | | | | | |
| 1671; 1672; 33/34 | | | | | |
| 837; 357386972; | 1924 | 2746 | n/a | n/a | n/a |
| NC_016109.1; | | | | | |
| 1673; 1674; 26/27 | | | | | |
| 838; 822214995; | n/a | 2387 | n/a | n/a | n/a |
| NZ_CP007699.1; | | | | | |
| 1675; 1676; 73/74 | | | | | |
| 839; 558542923; | n/a | 3128 | n/a | n/a | 4150 |
| AWQW01000003.1; | | | | | |
| 1677; 1678; 19/20 | | | | | |
| 840; 671535174; | 1909 | 3390 | n/a | n/a | n/a |
| NZ_JOHY01000024.1; | | | | | |
| 1679; 1680; 29/30 | | | | | |
| 841; 671472153; | n/a | n/a | n/a | n/a | n/a |
| NZ_JOFR01000001.1; | | | | | |
| 1681; 1682; 21/22 | | | | | |
| 842; 919546534; | n/a | 3628 | n/a | n/a | n/a |
| NZ_JOEL01000027.1; | | | | | |
| 1683; 1684; 33/34 | | | | | |
| 843; 665530468; | n/a | 3581 | n/a | n/a | n/a |
| NZ_JOCD01000052.1; | | | | | |
| 1685; 1686; 26/27 | | | | | |
| 844; 563312125; | 1420 | 2475 | n/a | n/a | n/a |
| AYTZ01000052.1; | | | | | |
| 1687; 1688; 31/32 | | | | | |
| 845; 654993549; | n/a | 3265 | n/a | n/a | n/a |
| NZ_AZVE01000016.1; | | | | | |
| 1689; 1690; 29/30 | | | | | |
| 846; 663180071; | 1987 | 3081 | n/a | n/a | n/a |
| NZ_JOBE0000043.1; | | | | | |
| 1691; 1692; 28/29 | | | | | |
| 847; 664256887; | n/a | 3578 | n/a | n/a | 4499 |
| NZ_JODF01000036.1; | | | | | |
| 1693; 1694; 51/52 | | | | | |
| 848; 558542923; | n/a | 2473 | n/a | n/a | 3851 |
| AWQW01000003.1; | | | | | |
| 1695; 1696; 19/20 | | | | | |
| 849; 906344341; | 2247 | 3515 | 4472 | n/a | n/a |
| NZ_LFXA01000009.1; | | | | | |
| 1697; 1698; 25/26 | | | | | |
| 850; 563312125; | 1440 | 2502 | n/a | n/a | n/a |
| AYTZ01000052.1; | | | | | |
| 1699; 1700; 31/32 | | | | | |
| 851; 486330103; | 1724 | 2884 | n/a | n/a | n/a |
| NZ_KB913032.1; | | | | | |
| 1701; 1702; 31/32 | | | | | |
| 852; 663693444; | n/a | 3093 | n/a | n/a | n/a |
| NZ_JOFI01000027.1; | | | | | |
| 1703; 1704; 31/32 | | | | | |
| 853; 664299296; | 2198 | 3110 | 4282 | n/a | n/a |
| NZ_JOIK01000008.1; | | | | | |
| 1705; 1706; 25/26 | | | | | |
| 854; 925610911; | 1470 | 2542 | n/a | n/a | n/a |
| LGEE01000058.1; | | | | | |
| 1707; 1708; 28/29 | | | | | |
| 855; 663317502; | 2192 | 3085 | 4500 | n/a | n/a |
| NZ_JNZ001000008.1; | | | | | |
| 1709; 1710; 40/41 | | | | | |
| 856; 384145136; | n/a | 2714 | n/a | n/a | 4004 |
| NC_017186.1; | | | | | |
| 1711; 1712; 53/54 | | | | | |
| 857; 925610911; | 2259 | 3653 | n/a | n/a | n/a |
| LGEE01000058.1; | | | | | |
| 1713; 1714; 28/29 | | | | | |
| 858; 486324513; | 1715 | 2874 | n/a | n/a | n/a |
| NZ_KB913024.1; | | | | | |
| 1715; 1716; 37/38 | | | | | |
| 859; 759802587; | n/a | 3398 | n/a | n/a | 4512 |
| NZ_CP009438.1; | | | | | |
| 1717; 1718; 50/51 | | | | | |
| 860; 921220646; | 2069 | 3636 | n/a | n/a | n/a |
| NZ_JXYI02000059.1; | | | | | |
| 1719; 1720; 27/28 | | | | | |
| 861; 818476494; | n/a | 2391 | n/a | n/a | 3793 |
| KP274854.1; | | | | | |
| 1721; 1722; 53/54 | | | | | |
| 862; 365866490; | n/a | 3547 | n/a | n/a | n/a |
| NZ_AGSW01000226.1; | | | | | |
| 1723; 1724; 28/29 | | | | | |
| 863; 365866490; | n/a | 2446 | n/a | n/a | n/a |
| NZ_AGSW01000226.1; | | | | | |
| 1725; 1726; 28/29 | | | | | |
| 864; 937182893; | 2280 | 3688 | n/a | n/a | n/a |
| NZ_LFCW01000001.1; | | | | | |
| 1727; 1728; 31/32 | | | | | |
| 865; 484022237; | 1683 | 2831 | n/a | n/a | n/a |
| NZ_ANBD01000111.1; | | | | | |
| 1729; 1730; 22/23 | | | | | |
| 866; 747653426; | n/a | 2425 | n/a | n/a | 3818 |
| CDME01000011.1; | | | | | |
| 1731; 1732; 35/36 | | | | | |
| 867; 365866490; | n/a | 3569 | n/a | n/a | n/a |
| NZ_AGSW01000226.1; | | | | | |
| 1733; 1734; 28/29 | | | | | |
| 868; 926317398; | 2258 | 3652 | n/a | n/a | n/a |
| NZ_LGDO01000015.1; | | | | | |
| 1735; 1736; 27/28 | | | | | |
| 869; 746616581; | 1351 | 2383 | n/a | n/a | n/a |
| KF954512.1; | | | | | |
| 1737; 1738; 13/14 | | | | | |
| 870; 749658562; | 2019 | 3616 | n/a | n/a | n/a |
| NZ_CP010519.1; | | | | | |
| 1739; 1740; 29/30 | | | | | |
| 871; 487404592; | n/a | 2888 | n/a | n/a | 4132 |
| NZ_ARVW01000001.1; | | | | | |
| 1741; 1742; 41/42 | | | | | |
| 872; 389759651; | 1397 | 2449 | n/a | n/a | n/a |
| NZ_AJXS01000437.1; | | | | | |
| 1743; 1744; 26/27 | | | | | |
| 873; 930491003; | n/a | 3682 | n/a | n/a | 4542 |
| NZ_LJCU01000287.1; | | | | | |
| 1745; 1746; 29/30 | | | | | |
| 874; 484016556; | 1681 | 2986 | n/a | n/a | n/a |
| NZ_ANAX01000372.1; | | | | | |
| 1747; 1748; 27/28 | | | | | |
| 875; 433601838; | n/a | 3354 | n/a | n/a | 4045 |
| NC_019673.1; | | | | | |
| 1749; 1750; 44/45 | | | | | |
| 876; 483974021; | 1705 | 3270 | n/a | n/a | n/a |
| NZ_KB891893.1; | | | | | |
| 1751; 1752; 23/24 | | | | | |
| 877; 930491003; | n/a | 2545 | n/a | n/a | 3887 |
| NZ_LJCU01000287.1; | | | | | |
| 1753; 1754; 29/30 | | | | | |
| 878; 749658562; | 1352 | 2384 | n/a | n/a | n/a |
| NZ_CP010519.1; | | | | | |
| 1755; 1756; 29/30 | | | | | |
| 879; 759755931; | 2188 | 3396 | n/a | n/a | n/a |
| NZ_JAIY01000003.1; | | | | | |
| 1757; 1758; 27/28 | | | | | |
| 880; 484007204; | 1678 | 2821 | 4086 | n/a | n/a |
| NZ_ANAC01000034.1; | | | | | |
| 1759; 1760; 25/26 | | | | | |
| 881; 433601838; | n/a | 2416 | n/a | n/a | 3811 |
| NC_019673.1; | | | | | |
| 1761; 1762; 44/45 | | | | | |
| 882; 254387191; | 1554 | 3542 | n/a | n/a | n/a |
| NZ_DS570483.1; | | | | | |
| 1763; 1764; 27/28 | | | | | |
| 883; 345007457; | 1623 | 2740 | 4024 | n/a | n/a |
| NC_015951.1; | | | | | |
| 1765; 1766; 38/39 | | | | | |
| 884; 297558985; | 2138 | 2713 | n/a | n/a | n/a |
| NC_014210.1; | | | | | |
| 1767; 1768; 27/28 | | | | | |
| 885; 927872504; | 2270 | 3457 | 4439 | n/a | n/a |
| NZ_CP011452.2; | | | | | |
| 1769; 1770; 12/13 | | | | | |
| 886; 970555001; | 2334 | 3759 | 4593 | n/a | n/a |
| NZ_LNRZ01000006.1; | | | | | |
| 1771; 1772; 25/26 | | | | | |
| 887; 960424655; | 2331 | 3754 | 4589 | n/a | n/a |
| NZ_CYUE01000025.1; | | | | | |
| 1773; 1774; 21/22 | | | | | |
| 888; 483994857; | 1723 | 2989 | 4129 | n/a | n/a |
| NZ_KB893599.1; | | | | | |
| 1775; 1776; 33/34 | | | | | |
| 889; 817524426; | 2093 | 3452 | 4435 | n/a | n/a |
| NZ_CP010429.1; | | | | | |
| 1777; 1778; 33/34 | | | | | |
| 890; 970361514; | 1481 | 2556 | 3896 | n/a | n/a |
| LOCL01000028.1; | | | | | |
| 1779; 1780; 21/22 | | | | | |
| 891; 970574347; | 2335 | 3760 | 4008 | n/a | n/a |
| NZ_LNZF01000001.1; | | | | | |
| 1781; 1782; 20/21 | | | | | |
| 892; 970574347; | 1610 | 3758 | 4373 | n/a | n/a |
| NZ_LNZF01000001.1; | | | | | |
| 1783; 1784; 20/21 | | | | | |
| 893; 961447255; | 1365 | 2402 | 3799 | n/a | n/a |
| CP013653.1; | | | | | |
| 1785; 1786; 20/21 | | | | | |
| 894; 283814236; | 1329 | 2354 | 3766 | n/a | n/a |
| CP001769.1; | | | | | |
| 1787; 1788; 35/36 | | | | | |
| 895; 746187486; | n/a | 3304 | 4506 | n/a | n/a |
| NZ_JWSY01000011.1; | | | | | |
| 1789; 1790; 12/13 | | | | | |
| 896; 960412751; | 2330 | 3753 | 4588 | n/a | n/a |
| NZ_LN881722.1; | | | | | |
| 1791; 1792; 19/20 | | | | | |
| 897; 970293907; | n/a | 2555 | n/a | n/a | n/a |
| LOHP01000076.1; | | | | | |
| 1793; 1794; 22/23 | | | | | |
| 898; 943388237; | 2295 | 3704 | 4547 | n/a | n/a |
| NZ_LIQD01000001.1; | | | | | |
| 1795; 1796; 21/22 | | | | | |
| 899; 944415035; | n/a | 3719 | n/a | n/a | 4562 |
| NZ_LIRG01000370.1; | | | | | |
| 1797; 1798; 51/52 | | | | | |
| 900; 944005810; | 2304 | 3714 | 4557 | n/a | n/a |
| NZ_LIQT01000057.1; | | | | | |
| 1799; 1800; 28/29 | | | | | |
| 901; 944020089; | n/a | 3716 | n/a | n/a | 4559 |
| NZ_LIPR01000230.1; | | | | | |
| 1801; 1802; 51/52 | | | | | |
| 902; 944020089; | n/a | 3718 | n/a | n/a | 4561 |
| NZ_LIPR01000230.1; | | | | | |
| 1803; 1804; 51/52 | | | | | |
| 903; 943922567; | n/a | 3711 | 4554 | n/a | n/a |
| NZ_LIQU01000247.1; | | | | | |
| 1805; 1806; 29/30 | | | | | |
| 904; 969919061; | 2333 | 3756 | 4591 | n/a | n/a |
| NZ_LDRR01000065.1; | | | | | |
| 1807; 1808; 21/22 | | | | | |
| 905; 969919061; | 2333 | 3756 | 4591 | n/a | n/a |
| NZ_LDRR01000065.1; | | | | | |
| 1809; 1810; 21/22 | | | | | |
| 906; 969919061; | 2333 | 3757 | 4592 | n/a | n/a |
| NZ_LDRR01000065.1; | | | | | |
| 1811; 1812; 21/22 | | | | | |
| 907; 969919061; | 2333 | 3757 | 4592 | n/a | n/a |
| NZ_LDRR01000065.1; | | | | | |
| 1813; 1814; 21/22 | | | | | |
| 908; 969919061; | 2332 | 3755 | 4590 | n/a | n/a |
| NZ_LDRR01000065.1; | | | | | |
| 1815; 1816; 21/22 | | | | | |
| 909; 969919061; | 2332 | 3755 | 4590 | n/a | n/a |
| NZ_LDRR01000065.1; | | | | | |
| 1817; 1818; 21/22 | | | | | |
| 910; 483454700; | 1722 | 2987 | 4128 | n/a | n/a |
| NZ_KB903974.1; | | | | | |
| 1819; 1820; 31/32 | | | | | |
| 911; 970579907; | 2336 | 3761 | n/a | n/a | n/a |
| NZ_KQ759763.1; | | | | | |
| 1821; 1822; 27/28 | | | | | |
| 912; 947401208; | 2311 | 3725 | n/a | n/a | n/a |
| NZ_LMKW01000010.1; | | | | | |
| 1823; 1824; 20/21 | | | | | |
| 913; 941965142; | 2293 | 3702 | n/a | n/a | n/a |
| NZ_LKIT01000002.1; | | | | | |
| 1825; 1826; 26/27 | | | | | |
| 914; 941965142; | 2293 | 3702 | n/a | n/a | n/a |
| NZ_LKIT01000002.1; | | | | | |
| 1827; 1828; 29/30 | | | | | |
| 915; 312193897; | n/a | 2720 | n/a | n/a | n/a |
| NC_014666.1; | | | | | |
| 1829; 1830; 35/36 | | | | | |
| 916; 736762362; | 1939 | 3187 | 4323 | n/a | n/a |
| NZ_CCDN010000009.1; | | | | | |
| 1831; 1832; 19/20 | | | | | |
| 917; 651596980; | 1784 | 2997 | 4190 | n/a | n/a |
| NZ_AXVB01000011.1; | | | | | |
| 1833; 1834; 19/20 | | | | | |
| 918; 850356871; | 2110 | 3482 | 4454 | n/a | n/a |
| NZ_LDWN01000016.1; | | | | | |
| 1835; 1836; 11/12 | | | | | |
| 919; 924654439; | 2253 | 3644 | 4523 | n/a | n/a |
| NZ_LIUS01000003.1; | | | | | |
| 1837; 1838; 19/20 | | | | | |
| 920; 238801497; | 1706 | 2620 | 3897 | n/a | n/a |
| NZ_CM000745.1; | | | | | |
| 1839; 1840; 19/20 | | | | | |
| 921; 651983111; | 2171 | 3001 | 4192 | n/a | n/a |
| NZ_KE387239.1; | | | | | |
| 1841; 1842; 23/24 | | | | | |
| 922; 727343482; | 1706 | 2593 | 3897 | n/a | n/a |
| NZ_JMQD01000030.1; | | | | | |
| 1843; 1844; 19/20 | | | | | |
| 923; 423557538; | 1499 | 2580 | 3913 | n/a | n/a |
| NZ_JH792114.1; | | | | | |
| 1845; 1846; 19/20 | | | | | |
| 924; 727343482; | 1706 | 3175 | 3897 | n/a | n/a |
| NZ_JMQD01000030.1; | | | | | |
| 1847; 1848; 19/20 | | | | | |
| 925; 727343482; | 1486 | 2789 | 4066 | n/a | n/a |
| NZ_JMQD01000030.1; | | | | | |
| 1849; 1850; 19/20 | | | | | |
| 926; 727343482; | 1486 | 2785 | 4066 | n/a | n/a |
| NZ_JMQD01000030.1; | | | | | |
| 1851; 1852; 19/20 | | | | | |
| 927; 727343482; | 1486 | 2786 | 4067 | n/a | n/a |
| NZ_JMQD01000030.1; | | | | | |
| 1853; 1854; 19/20 | | | | | |
| 928; 727343482; | 1762 | 2961 | 3897 | n/a | n/a |
| NZ_JMQD01000030.1; | | | | | |
| 1855; 1856; 19/20 | | | | | |
| 929; 487368297; | 1718 | 2877 | 4122 | n/a | n/a |
| NZ_KB910953.1; | | | | | |
| 1857; 1858; 19/20 | | | | | |
| 930; 423614674; | 1488 | 2562 | 3904 | n/a | n/a |
| NZ_JH792165.1; | | | | | |
| 1859; 1860; 19/20 | | | | | |
| 931; 727343482; | 1502 | 2584 | 3916 | n/a | n/a |
| NZ_JMQD01000030.1; | | | | | |
| 1861; 1862; 19/20 | | | | | |
| 932; 727343482; | 1486 | 2788 | 4066 | n/a | n/a |
| NZ_JMQD01000030.1; | | | | | |
| 1863; 1864; 19/20 | | | | | |
| 933; 727343482; | 1486 | 2583 | 3897 | n/a | n/a |
| NZ_JMQD01000030.1; | | | | | |
| 1865; 1866; 19/20 | | | | | |
| 934; 736214556; | 1935 | 3183 | 4321 | n/a | n/a |
| NZ_KN360955.1; | | | | | |
| 1867; 1868; 19/20 | | | | | |
| 935; 507060152; | 1653 | 2787 | 4068 | n/a | n/a |
| NZ_KB976714.1; | | | | | |
| 1869; 1870; 19/20 | | | | | |
| 936; 727343482; | 1486 | 2570 | 3897 | n/a | n/a |
| NZ_JMQD01000030.1; | | | | | |
| 1871; 1872; 19/20 | | | | | |
| 937; 737456981; | 1948 | 3201 | 4502 | n/a | n/a |
| NZ_KN050811.1; | | | | | |
| 1873; 1874; 11/12 | | | | | |
| 938; 880954155; | 2118 | 3491 | 4462 | n/a | n/a |
| NZ_JVPL01000109.1; | | | | | |
| 1875; 1876; 19/20 | | | | | |
| 939; 751619763; | 2026 | 3348 | 4385 | n/a | n/a |
| NZ_JXRP01000009.1; | | | | | |
| 1877; 1878; 13/14 | | | | | |
| 940; 727343482; | 1486 | 3384 | 3897 | n/a | n/a |
| NZ_JMQD01000030.1; | | | | | |
| 1879; 1880; 19/20 | | | | | |
| 941; 806951735; | 1490 | 2561 | 3905 | n/a | n/a |
| NZ_JSFD01000011.1; | | | | | |
| 1881; 1882; 19/20 | | | | | |
| 942; 736160933; | 1934 | 3182 | 4320 | n/a | n/a |
| NZ_JQMI01000015.1; | | | | | |
| 1883; 1884; 19/20 | | | | | |
| 943; 736160933; | 1934 | 3182 | 4320 | n/a | n/a |
| NZ_JQMI01000015.1; | | | | | |
| 1885; 1886; 19/20 | | | | | |
| 944; 872696015; | 2115 | 3485 | 4460 | n/a | n/a |
| NZ_LABO01000035.1; | | | | | |
| 1887; 1888; 19/20 | | | | | |
| 945; 806951735; | 1493 | 2572 | 3905 | n/a | n/a |
| NZ_JSFD01000011.1; | | | | | |
| 1889; 1890; 19/20 | | | | | |
| 946; 806951735; | 2087 | 3444 | 3905 | n/a | n/a |
| NZ_JSFD01000011.1; | | | | | |
| 1891; 1892; 19/20 | | | | | |
| 947; 950170460; | 2323 | 3742 | 4580 | n/a | n/a |
| NZ_LMTA01000046.1; | | | | | |
| 1893; 1894; 19/20 | | | | | |
| 948; 872696015; | 1498 | 2585 | 3917 | n/a | n/a |
| NZ_LAB001000035.1; | | | | | |
| 1895; 1896; 19/20 | | | | | |
| 949; 163938013; | 1596 | 2695 | 3991 | n/a | n/a |
| NC_010184.1; | | | | | |
| 1897; 1898; 13/14 | | | | | |
| 950; 872696015; | 1498 | 2782 | 4064 | n/a | n/a |
| NZ_LABO01000035.1; | | | | | |
| 1899; 1900; 19/20 | | | | | |
| 951; 238801491; | 1487 | 2560 | 3902 | n/a | n/a |
| NZ_CM000739.1; | | | | | |
| 1901; 1902; 19/20 | | | | | |
| 952; 657629081; | 1837 | 3068 | 4237 | n/a | n/a |
| NZ_AYPV01000024.1; | | | | | |
| 1903; 1904; 19/20 | | | | | |
| 953; 507035131; | 1652 | 2783 | 4065 | n/a | n/a |
| NZ_KB976800.1; | | | | | |
| 1905; 1906; 19/20 | | | | | |
| 954; 737576092; | 1951 | 3205 | 4331 | n/a | n/a |
| NZ_JRNX01000441.1; | | | | | |
| 1907; 1908; 3/4 | | | | | |
| 955; 947983982; | 2321 | 3737 | 4578 | n/a | n/a |
| NZ_LMRV01000044.1; | | | | | |
| 1909; 1910; 11/12 | | | | | |
| 956; 946400391; | 2324 | 3743 | 4581 | n/a | n/a |
| LMRY01000003.1; | | | | | |
| 1911; 1912; 23/24 | | | | | |
| 957; 423456860; | 1495 | 2568 | 3906 | n/a | n/a |
| NZ_JH791975.1; | | | | | |
| 1913; 1914; 19/20 | | | | | |
| 958; 514340871; | 1494 | 2575 | 3908 | n/a | n/a |
| NZ_KE150045.1; | | | | | |
| 1915; 1916; 19/20 | | | | | |
| 959; 946400391; | 1480 | 2554 | 3895 | n/a | n/a |
| LMRY01000003.1; | | | | | |
| 1917; 1918; 23/24 | | | | | |
| 960; 655103160; | 1825 | 3046 | 4220 | n/a | n/a |
| NZ_JMLS01000021.1; | | | | | |
| 1919; 1920; 11/12 | | | | | |
| 961; 910095435; | 1930 | 2577 | 3910 | n/a | n/a |
| NZ_JNLY01000005.1; | | | | | |
| 1921; 1922; 19/20 | | | | | |
| 962; 910095435; | 1931 | 2581 | 3910 | n/a | n/a |
| NZ_JNLY01000005.1; | | | | | |
| 1923; 1924; 19/20 | | | | | |
| 963; 910095435; | 1931 | 3519 | 4474 | n/a | n/a |
| NZ_JNLY01000005.1; | | | | | |
| 1925; 1926; 19/20 | | | | | |
| 964; 910095435; | 1930 | 3174 | 3910 | n/a | n/a |
| NZ_JNLY01000005.1; | | | | | |
| 1927; 1928; 19/20 | | | | | |
| 965; 922780240; | 2248 | 3638 | 4521 | n/a | n/a |
| NZ_LIGH01000001.1; | | | | | |
| 1929; 1930; 21/22 | | | | | |
| 966; 929005248; | 2275 | 3676 | 4539 | n/a | n/a |
| NZ_LGHP01000003.1; | | | | | |
| 1931; 1932; 21/22 | | | | | |
| 967; 767005659; | n/a | 3428 | n/a | n/a | n/a |
| NZ_CP010976.1; | | | | | |
| 1933; 1934; 19/20 | | | | | |
| 968; 507017505; | 1651 | 2780 | 4063 | n/a | n/a |
| NZ_KB976530.1; | | | | | |
| 1935; 1936; 19/20 | | | | | |
| 969; 423520617; | 1498 | 2579 | 3912 | n/a | n/a |
| NZ_JH792148.1; | | | | | |
| 1937; 1938; 19/20 | | | | | |
| 970; 910095435; | 1930 | 2574 | 4317 | n/a | n/a |
| NZ_JNLY01000005.1; | | | | | |
| 1939; 1940; 19/20 | | | | | |
| 971; 507020427; | 1497 | 2578 | 3911 | n/a | n/a |
| NZ_KB976152.1; | | | | | |
| 1941; 1942; 19/20 | | | | | |
| 972; 910095435; | 1488 | 2565 | 3900 | n/a | n/a |
| NZ_JNLY01000005.1; | | | | | |
| 1943; 1944; 19/20 | | | | | |
| 973; 483299154; | 1672 | 2813 | 4083 | n/a | n/a |
| NZ_AMGD01000001.1; | | | | | |
| 1945; 1946; 19/20 | | | | | |
| 974; 483299154; | 1672 | 2813 | 4083 | n/a | n/a |
| NZ_AMGD01000001.1; | | | | | |
| 1947; 1948; 19/20 | | | | | |
| 975; 910095435; | 1488 | 2784 | 3900 | n/a | n/a |
| NZ_JNLY01000005.1; | | | | | |
| 1949; 1950; 19/20 | | | | | |
| 976; 423468694; | 1496 | 2576 | 3909 | n/a | n/a |
| NZ_JH804628.1; | | | | | |
| 1951; 1952; 19/20 | | | | | |
| 977; 507020427; | 1491 | 2569 | 3898 | n/a | n/a |
| NZ_KB976152.1; | | | | | |
| 1953; 1954; 19/20 | | | | | |
| 978; 910095435; | 1488 | 2564 | 3900 | n/a | n/a |
| NZ_JNLY01000005.1; | | | | | |
| 1955; 1956; 19/20 | | | | | |
| 979; 910095435; | 1488 | 2566 | 3900 | n/a | n/a |
| NZ_JNLY01000005.1; | | | | | |
| 1957; 1958; 19/20 | | | | | |
| 980; 423609285; | 1501 | 2582 | 3915 | n/a | n/a |
| NZ_JH792232.1; | | | | | |
| 1959; 1960; 19/20 | | | | | |
| 981; 947966412; | 2320 | 3736 | 4576 | n/a | n/a |
| NZ_LMSD01000001.1; | | | | | |
| 1961; 1962; 19/20 | | | | | |
| 982; 947966412; | 2320 | 3736 | 4576 | n/a | n/a |
| NZ_LMSD01000001.1; | | | | | |
| 1963; 1964; 19/20 | | | | | |
| 983; 507020427; | 1497 | 2781 | 3911 | n/a | n/a |
| NZ_KB976152.1; | | | | | |
| 1965; 1966; 19/20 | | | | | |
| 984; 910095435; | 1489 | 2567 | 3899 | n/a | n/a |
| NZ_JNLY01000005.1; | | | | | |
| 1967; 1968; 19/20 | | | | | |
| 985; 950280827; | 2325 | 3744 | 4583 | n/a | n/a |
| NZ_LMSJ01000026.1; | | | | | |
| 1969; 1970; 19/20 | | | | | |
| 986; 656249802; | 1833 | 3062 | 4230 | n/a | n/a |
| NZ_AUGY01000047.1; | | | | | |
| 1971; 1972; 19/20 | | | | | |
| 987; 238801471; | 1500 | 2573 | 3914 | n/a | n/a |
| NZ_CM000719.1; | | | | | |
| 1973; 1974; 19/20 | | | | | |
| 988; 485048843; | 1711 | 2867 | 4111 | n/a | n/a |
| NZ_ALEG01000067.1; | | | | | |
| 1975; 1976; 19/20 | | | | | |
| 989; 647636934; | 1773 | 2979 | 4182 | n/a | n/a |
| NZ_JANV01000106.1; | | | | | |
| 1977; 1978; 19/20 | | | | | |
| 990; 910095435; | 1488 | 2563 | 3901 | n/a | n/a |
| NZ_JNLY01000005.1; | | | | | |
| 1979; 1980; 19/20 | | | | | |
| 991; 817541164; | 2092 | 3454 | 4438 | n/a | n/a |
| NZ_LATZ01000026.1; | | | | | |
| 1981; 1982; 19/20 | | | | | |
| 992; 488570484; | 2032 | 2770 | 4057 | n/a | n/a |
| NC_021171.1; | | | | | |
| 1983; 1984; 19/20 | | | | | |
| 993; 914730676; | 2149 | 3540 | 4481 | n/a | n/a |
| NZ_LFQJ01000032.1; | | | | | |
| 1985; 1986; 19/20 | | | | | |
| 994; 928874573; | 2052 | 3670 | 4404 | n/a | n/a |
| NZ_LIXL01000208.1; | | | | | |
| 1987; 1988; 19/20 | | | | | |
| 995; 928874573; | 2052 | 3670 | 4404 | n/a | n/a |
| NZ_LIXL01000208.1; | | | | | |
| 1989; 1990; 19/20 | | | | | |
| 996; 655165706; | 1969 | 3050 | 4222 | n/a | n/a |
| NZ_KE383843.1; | | | | | |
| 1991; 1992; 11/12 | | | | | |
| 997; 656245934; | 1832 | 3060 | 4229 | n/a | n/a |
| NZ_KE383845.1; | | | | | |
| 1993; 1994; 19/20 | | | | | |
| 998; 928874573; | 2052 | 3385 | 4404 | n/a | n/a |
| NZ_LIXL01000208.1; | | | | | |
| 1995; 1996; 19/20 | | | | | |
| 999; 928874573; | 2052 | 3385 | 4404 | n/a | n/a |
| NZ_LIXL01000208.1; | | | | | |
| 1997; 1998; 19/20 | | | | | |
| 1000; 924371245; | n/a | 3642 | n/a | n/a | n/a |
| NZ_LITP01000001.1; | | | | | |
| 1999; 2000; 19/20 | | | | | |
| 1001; 654948246; | 1819 | 3040 | 4216 | n/a | n/a |
| NZ_KI632505.1; | | | | | |
| 2001; 2002; 11/12 | | | | | |
| 1002; 657210762; | 2051 | 2750 | 4033 | n/a | n/a |
| NZ_AXZS01000018.1; | | | | | |
| 2003; 2004; 19/20 | | | | | |
| 1003; 571146044; | 1747 | 2916 | 4153 | n/a | n/a |
| BAUW01000006.1; | | | | | |
| 2005; 2006; 19/20 | | | | | |
| 1004; 935460965; | n/a | 3685 | n/a | n/a | n/a |
| NZ_LIUT01000006.1; | | | | | |
| 2007; 2008; 19/20 | | | | | |
| 1005; 651516582; | 2175 | 2995 | 4189 | n/a | n/a |
| NZ_JAEK01000001.1; | | | | | |
| 2009; 2010; 19/20 | | | | | |
| 1006; 657210762; | 1820 | 3042 | 4217 | n/a | n/a |
| NZ_AXZS01000018.1; | | | | | |
| 2011; 2012; 19/20 | | | | | |
| 1007; 657210762; | 2105 | 3476 | 4448 | n/a | n/a |
| NZ_AXZS01000018.1; | | | | | |
| 2013; 2014; 19/20 | | | | | |
| 1008; 723602665; | 1929 | 3173 | 4315 | n/a | n/a |
| NZ_JPIE01000001.1; | | | | | |
| 2015; 2016; 19/20 | | | | | |
| 1009; 657210762; | 1834 | 3065 | 4233 | n/a | n/a |
| NZ_AXZS01000018.1; | | | | | |
| 2017; 2018; 19/20 | | | | | |
| 1010; 933903534; | 1475 | 2549 | 3891 | n/a | n/a |
| LIXZ01000017.1; | | | | | |
| 2019; 2020; 11/12 | | | | | |
| 1011; 654954291; | n/a | 3041 | n/a | n/a | n/a |
| NZ_JAEO01000006.1; | | | | | |
| 2021; 2022; 19/20 | | | | | |
| 1012; 238801472; | 1482 | 2559 | 4316 | n/a | n/a |
| NZ_CM000720.1; | | | | | |
| 2023; 2024; 11/12 | | | | | |
| 1013; 651516582; | 2175 | 2995 | 4189 | n/a | n/a |
| NZ_JAEK01000001.1; | | | | | |
| 2025; 2026; 19/20 | | | | | |
| 1014; 910095435; | 1340 | 2369 | 3776 | n/a | n/a |
| NZ_JNLY01000005.1; | | | | | |
| 2027; 2028; 19/20 | | | | | |
| 1015; 403048279; | n/a | 2671 | n/a | n/a | n/a |
| NZ_HE610988.1; | | | | | |
| 2029; 2030; 19/20 | | | | | |
| 1016; 750677319; | 2222 | 3339 | 4509 | n/a | n/a |
| NZ_CBQR020000171.1; | | | | | |
| 2031; 2032; 20/21 | | | | | |
| 1017; 849078078; | 2109 | 3481 | 4453 | n/a | n/a |
| NZ_LFJO01000006.1; | | | | | |
| 2033; 2034; 18/19 | | | | | |
| 1018; 890672806; | 1712 | 3329 | 4112 | n/a | n/a |
| NZ_CP011974.1; | | | | | |
| 2035; 2036; 0/1 | | | | | |
| 1019; 890672806; | 1712 | 3446 | 4112 | n/a | n/a |
| NZ_CP011974.1; | | | | | |
| 2037; 2038; 0/1 | | | | | |
| 1020; 727078508; | n/a | 2514 | n/a | n/a | n/a |
| JRNV01000046.1; | | | | | |
| 2039; 2040; 19/20 | | | | | |
| 1021; 749299172; | 1995 | 3278 | 4363 | n/a | n/a |
| NZ_CP009241.1; | | | | | |
| 2041; 2042; 19/20 | | | | | |
| 1022; 652787974; | 2169 | 3015 | 4203 | n/a | n/a |
| NZ_AUCP01000055.1; | | | | | |
| 2043; 2044; 50/51 | | | | | |
| 1023; 652787974; | 2169 | 3015 | 4203 | n/a | n/a |
| NZ_AUCP01000055.1; | | | | | |
| 2045; 2046; 23/24 | | | | | |
| 1024; 486346141; | 1717 | 2876 | 4121 | n/a | n/a |
| NZ_KB910518.1; | | | | | |
| 2047; 2048; 19/20 | | | | | |
| 1025; 951610263; | 2328 | 3747 | 4586 | n/a | n/a |
| NZ_LMBV01000004.1; | | | | | |
| 2049; 2050; 19/20 | | | | | |
| 1026; 354585485; | n/a | 2629 | n/a | n/a | n/a |
| NZ_AGIP01000020.1; | | | | | |
| 2051; 2052; 19/20 | | | | | |
| 1027; 940346731; | 2292 | 3701 | 4546 | n/a | n/a |
| NZ_LJCO01000107.1; | | | | | |
| 2053; 2054; 19/20 | | | | | |
| 1028; 880997761; | 2119 | 3492 | 4463 | n/a | n/a |
| NZ_JVDT01000118.1; | | | | | |
| 2055; 2056; 20/21 | | | | | |
| 1029; 880997761; | 1910 | 3132 | 4300 | n/a | n/a |
| NZ_JVDT01000118.1; | | | | | |
| 2057; 2058; 20/21 | | | | | |
| 1030; 746258261; | 2038 | 3369 | 4514 | n/a | n/a |
| NZ_JUEI01000069.1; | | | | | |
| 2059; 2060; 19/20 | | | | | |
| 1031; 849059098; | 2108 | 3480 | 4452 | n/a | n/a |
| NZ_LDUE01000022.1; | | | | | |
| 2061; 2062; 22/23 | | | | | |
| 1032; 746258261; | 2003 | 3309 | 4367 | n/a | n/a |
| NZ_JUEI01000069.1; | | | | | |
| 2063; 2064; 19/20 | | | | | |
| 1033; 754884871; | 2038 | 3375 | 4513 | n/a | n/a |
| NZ_CP009282.1; | | | | | |
| 2065; 2066; 19/20 | | | | | |
| 1034; 939708105; | 2291 | 3700 | 4545 | n/a | n/a |
| NZ_LN831205.1; | | | | | |
| 2067; 2068; 19/20 | | | | | |
| 1035; 738803633; | 1970 | 3225 | 4341 | n/a | n/a |
| NZ_ASPS01000022.1; | | | | | |
| 2069; 2070; 19/20 | | | | | |
| 1036; 754841195; | 2044 | 3374 | 4398 | n/a | n/a |
| NZ_CCDG010000069.1; | | | | | |
| 2071; 2072; 19/20 | | | | | |
| 1037; 754841195; | 2016 | 3326 | 4372 | n/a | n/a |
| NZ_CCDG010000069.1; | | | | | |
| 2073; 2074; 19/20 | | | | | |
| 1038; 751586078; | 2227 | 3346 | 4384 | n/a | n/a |
| NZ_JXRR01000001.1; | | | | | |
| 2075; 2076; 19/20 | | | | | |
| 1039; 970574347; | n/a | 2749 | 4032 | n/a | n/a |
| NZ_LNZF01000001.1; | | | | | |
| 2077; 2078; 20/21 | | | | | |
| 1040; 754841195; | 2041 | 3372 | 4395 | n/a | n/a |
| NZ_CCDG010000069.1; | | | | | |
| 2079; 2080; 19/20 | | | | | |
| 1041; 927084730; | 2267 | 3664 | 4534 | n/a | n/a |
| NZ_LITU01000050.1; | | | | | |
| 2081; 2082; 20/21 | | | | | |
| 1042; 738716739; | 1965 | 3220 | 4339 | n/a | n/a |
| NZ_ASPU01000015.1; | | | | | |
| 2083; 2084; 20/21 | | | | | |
| 1043; 738716739; | 1965 | 3220 | 4339 | n/a | n/a |
| NZ_ASPU01000015.1; | | | | | |
| 2085; 2086; 20/21 | | | | | |
| 1044; 639451286; | 1756 | 2956 | 4169 | n/a | n/a |
| NZ_AWUK01000007.1; | | | | | |
| 2087; 2088; 20/21 | | | | | |
| 1045; 738803633; | 1967 | 3223 | 4340 | n/a | n/a |
| NZ_ASPS01000022.1; | | | | | |
| 2089; 2090; 19/20 | | | | | |
| 1046; 484070054; | 1688 | 2838 | 4097 | n/a | n/a |
| NZ_ANHX01000029.1; | | | | | |
| 2091; 2092; 20/21 | | | | | |
| 1047; 484070054; | 1688 | 2838 | 4097 | n/a | n/a |
| NZ_ANHX01000029.1; | | | | | |
| 2093; 2094; 20/21 | | | | | |
| 1048; 754841195; | 2043 | 3373 | 4397 | n/a | n/a |
| NZ_CCDG010000069.1; | | | | | |
| 2095; 2096; 19/20 | | | | | |
| 1049; 948045460; | 2322 | 3739 | 4579 | n/a | n/a |
| NZ_LMFO01000023.1; | | | | | |
| 2097; 2098; 22/23 | | | | | |
| 1050; 652787974; | 2169 | 3016 | 4203 | n/a | n/a |
| NZ_AUCP01000055.1; | | | | | |
| 2099; 2100; 50/51 | | | | | |
| 1051; 652787974; | 2169 | 3016 | 4203 | n/a | n/a |
| NZ_AUCP01000055.1; | | | | | |
| 2101; 2102; 23/24 | | | | | |
| 1052; 924434005; | 1459 | 2530 | 3875 | n/a | n/a |
| LIYK01000027.1; | | | | | |
| 2103; 2104; 20/21 | | | | | |
| 1053; 926268043; | 2257 | 3648 | 4524 | n/a | n/a |
| NZ_CP012600.1; | | | | | |
| 2105; 2106; 19/20 | | | | | |
| 1054; 374605177; | 2023 | 2626 | 3940 | n/a | n/a |
| NZ_AHKH01000064.1; | | | | | |
| 2107; 2108; 19/20 | | | | | |
| 1055; 392955666; | 1541 | 2630 | 3943 | n/a | n/a |
| NZ_AKKV01000020.1; | | | | | |
| 2109; 2110; 19/20 | | | | | |
| 1056; 651937013; | 1786 | 2999 | 4191 | n/a | n/a |
| NZ_JHYI01000013.1; | | | | | |
| 2111; 2112; 19/20 | | | | | |
| 1057; 843088522; | 2106 | 3478 | 4449 | n/a | n/a |
| NZ_BBIW01000001.1; | | | | | |
| 2113; 2114; 17/18 | | | | | |
| 1058; 656245934; | 1832 | 3060 | 4229 | n/a | n/a |
| NZ_KE383845.1; | | | | | |
| 2115; 2116; 19/20 | | | | | |
| 1059; 651937013; | 1786 | 2999 | 4191 | n/a | n/a |
| NZ_JHYI01000013.1; | | | | | |
| 2117; 2118; 19/20 | | | | | |
| 1060; 430748349; | 1640 | 2767 | 4055 | n/a | n/a |
| NC_019897.1; | | | | | |
| 2119; 2120; 20/21 | | | | | |
| 1061; 947983982; | 2321 | 3737 | 4578 | n/a | n/a |
| NZ_LMRV01000044.1; | | | | | |
| 2121; 2122; 11/12 | | | | | |
| 1062; 749182744; | 2015 | 3596 | 4371 | n/a | n/a |
| NZ_CP009416.1; | | | | | |
| 2123; 2124; 19/20 | | | | | |
| 1063; 802929558; | 2235 | 3059 | 4228 | n/a | n/a |
| NZ_CP009933.1; | | | | | |
| 2125; 2126; 20/21 | | | | | |
| 1064; 550916528; | 1733 | 2898 | 4138 | n/a | n/a |
| NC_022571.1; | | | | | |
| 2127; 2128; 25/26 | | | | | |
| 1065; 950938054; | 2326 | 3745 | 3907 | n/a | n/a |
| NZ_CIHL01000007.1; | | | | | |
| 2129; 2130; 19/20 | | | | | |
| 1066; 571146044; | 1431 | 2490 | 3859 | n/a | n/a |
| BAUW01000006.1; | | | | | |
| 2131; 2132; 19/20 | | | | | |
| 1067; 571146044; | 1431 | 2490 | 3859 | n/a | n/a |
| BAUW01000006.1; | | | | | |
| 2133; 2134; 19/20 | | | | | |
| 1068; 427733619; | 2221 | 2760 | 4048 | n/a | n/a |
| NC_019678.1; | | | | | |
| 2135; 2136; 22/23 | | | | | |
| 1069; 657706549; | 1838 | 3070 | n/a | n/a | n/a |
| NZ_JNLM01000001.1; | | | | | |
| 2137; 2138; 44/45 | | | | | |
| 1070; 514429123; | 1654 | 2791 | 4484 | n/a | n/a |
| NZ_KE332377.1; | | | | | |
| 2139; 2140; 29/30 | | | | | |
| 1071; 514429123; | 1654 | 2791 | 4484 | n/a | n/a |
| NZ_KE332377.1; | | | | | |
| 2141; 2142; 29/30 | | | | | |
| 1072; 514429123; | 1654 | 2791 | 4484 | n/a | n/a |
| NZ_KE332377.1; | | | | | |
| 2143; 2144; 29/30 | | | | | |
| 1073; 931536013; | 1474 | 2548 | 3890 | n/a | n/a |
| LJUL01000022.1; | | | | | |
| 2145; 2146; 38/39 | | | | | |
| 1074; 931536013; | 1474 | 2548 | 3890 | n/a | n/a |
| LJUL01000022.1; | | | | | |
| 2147; 2148; 38/39 | | | | | |
| 1075; 931536013; | 1474 | 2548 | 3890 | n/a | n/a |
| LJUL01000022.1; | | | | | |
| 2149; 2150; 38/39 | | | | | |
| 1076; 931536013; | 1474 | 2548 | 3890 | n/a | n/a |
| LJUL01000022.1; | | | | | |
| 2151; 2152; 38/39 | | | | | |
| 1077; 931536013; | 1474 | 2548 | 3890 | n/a | n/a |
| LJUL01000022.1; | | | | | |
| 2153; 2154; 38/39 | | | | | |
| 1078; 931536013; | 1474 | 2548 | 3890 | n/a | n/a |
| LJUL01000022.1; | | | | | |
| 2155; 2156; 38/39 | | | | | |
| 1079; 575082509; | 1432 | 2492 | 3860 | n/a | n/a |
| BAVS01000030.1; | | | | | |
| 2157; 2158; 19/20 | | | | | |
| 1080; 930349143; | 1362 | 2398 | 3798 | n/a | n/a |
| CP012036.1; | | | | | |
| 2159; 2160; 21/22 | | | | | |
| 1081; 575082509; | 1432 | 2492 | 3860 | n/a | n/a |
| BAVS01000030.1; | | | | | |
| 2161; 2162; 19/20 | | | | | |
| 1082; 427705465; | 1637 | 2759 | 4047 | n/a | n/a |
| NC_019676.1; | | | | | |
| 2163; 2164; 21/22 | | | | | |
| 1083; 428303693; | 1639 | 2765 | 4054 | n/a | n/a |
| NC_019753.1; | | | | | |
| 2165; 2166; 15/16 | | | | | |
| 1084; 359367134; | 1578 | 3064 | 3969 | n/a | n/a |
| NZ_AFEJ01000154.1; | | | | | |
| 2167; 2168; 21/22 | | | | | |
| 1085; 359367134; | 1578 | 3064 | 3969 | n/a | n/a |
| NZ_AFEJ01000154.1; | | | | | |
| 2169; 2170; 21/22 | | | | | |
| 1086; 325957759; | 1614 | 2726 | 4012 | n/a | n/a |
| NC_015216.1; | | | | | |
| 2171; 2172; 21/22 | | | | | |
| 1087; 851140085; | 2111 | 3601 | 4456 | n/a | n/a |
| NZ_JQKN01000008.1; | | | | | |
| 2173; 2174; 21/22 | | | | | |
| 1088; 748181452; | 2014 | 3322 | 4370 | n/a | n/a |
| NZ_JTCM01000043.1; | | | | | |
| 2175; 2176; 21/22 | | | | | |
| 1089; 748181452; | 2014 | 3322 | 4370 | n/a | n/a |
| NZ_JTCM01000043.1; | | | | | |
| 2177; 2178; 21/22 | | | | | |
| 1090; 158333233; | 1595 | 2694 | 3990 | n/a | n/a |
| NC_009925.1; | | | | | |
| 2179; 2180; 21/22 | | | | | |
| 1091; 158333233; | 1595 | 2694 | 3990 | n/a | n/a |
| NC_009925.1; | | | | | |
| 2181; 2182; 21/22 | | | | | |
| 1092; 851114167; | 2232 | 3619 | 4455 | n/a | n/a |
| NZ_LN515531.1; | | | | | |
| 2183; 2184; 23/24 | | | | | |
| 1093; 952971377; | 1379 | 2426 | 3819 | n/a | n/a |
| LN734822.1; | | | | | |
| 2185; 2186; 25/26 | | | | | |
| 1094; 428267688; | n/a | 2372 | 3779 | n/a | n/a |
| CP003653.1; | | | | | |
| 2187; 2188; 22/23 | | | | | |
| 1095; 333986242; | 1617 | 2731 | 4017 | n/a | n/a |
| NC_015574.1; | | | | | |
| 2189; 2190; 24/25 | | | | | |
| 1096; 739419616; | 2178 | 3232 | 4490 | n/a | n/a |
| NZ_KK088564.1; | | | | | |
| 2191; 2192; 20/21 | | | | | |
| 1097; 739419616; | 2178 | 3232 | 4490 | n/a | n/a |
| NZ_KK088564.1; | | | | | |
| 2193; 2194; 31/32 | | | | | |
| 1098; 427727289; | 1638 | 2763 | 4052 | n/a | n/a |
| NC_019684.1; | | | | | |
| 2195; 2196; 21/22 | | | | | |
| 1099; 890002594; | 2121 | 3496 | 4466 | n/a | n/a |
| NZ_JXCA01000005.1; | | | | | |
| 2197; 2198; 21/22 | | | | | |
| 1100; 652337551; | 1788 | 3003 | 4194 | n/a | n/a |
| NZ_KI912149.1; | | | | | |
| 2199; 2200; 31/32 | | | | | |
| 1101; 427415532; | 1535 | 2624 | 3937 | n/a | n/a |
| NZ_JH993797.1; | | | | | |
| 2201; 2202; 22/23 | | | | | |
| 1102; 551035505; | 1736 | 2901 | n/a | n/a | n/a |
| NZ_ATVS01000030.1; | | | | | |
| 2203; 2204; 20/21 | | | | | |
| 1103; 553740975; | 2172 | 2907 | 4145 | n/a | n/a |
| NZ_AWNH01000084.1; | | | | | |
| 2205; 2206; 22/23 | | | | | |
| 1104; 851351157; | 2112 | 3483 | 4457 | n/a | n/a |
| NZ_JQLY01000001.1; | | | | | |
| 2207; 2208; 25/26 | | | | | |
| 1105; 485067373; | 1713 | 2868 | 4113 | n/a | n/a |
| NZ_KB217478.1; | | | | | |
| 2209; 2210; 58/59 | | | | | |
| 1106; 451945650; | 1341 | 2373 | 3780 | n/a | n/a |
| NC_020304.1; | | | | | |
| 2211; 2212; 36/37 | | | | | |
| 1107; 938259025; | 1478 | 2552 | 3892 | n/a | n/a |
| LJSW01000006.1; | | | | | |
| 2213; 2214; 25/26 | | | | | |
| 1108; 557371823; | 1741 | 3517 | 4473 | n/a | n/a |
| NZ_ASGZ01000002.1; | | | | | |
| 2215; 2216; 26/27 | | | | | |
| 1109; 336251750; | 1619 | 2735 | 4020 | n/a | n/a |
| NC_015658.1; | | | | | |
| 2217; 2218; 26/27 | | | | | |
| 1110; 557371823; | 1418 | 2472 | 3850 | n/a | n/a |
| NZ_ASGZ01000002.1; | | | | | |
| 2219; 2220; 26/27 | | | | | |
| 1111; 484104632; | 1689 | 2839 | 4098 | n/a | n/a |
| NZ_KB235948.1; | | | | | |
| 2221; 2222; 32/33 | | | | | |
| 1112; 484104632; | 1689 | 2839 | 4098 | n/a | n/a |
| NZ_KB235948.1; | | | | | |
| 2223; 2224; 32/33 | | | | | |
| 1113; 448406329; | 1537 | 2627 | 3941 | n/a | n/a |
| NZ_AOIU01000004.1; | | | | | |
| 2225; 2226; 24/25 | | | | | |
| 1114; 751565075; | 2025 | 3345 | 4383 | n/a | n/a |
| NZ_JXCB01000004.1; | | | | | |
| 2227; 2228; 21/22 | | | | | |
| 1115; 119943794; | 2034 | 2688 | 3984 | n/a | n/a |
| NC_008709.1; | | | | | |
| 2229; 2230; 38/39 | | | | | |
| 1116; 563938926; | 2319 | 3741 | 4575 | n/a | n/a |
| NZ_AYWX01000007.1; | | | | | |
| 2231; 2232; 26/27 | | | | | |
| 1117; 451945650; | 1642 | 3367 | 4508 | n/a | n/a |
| NC_020304.1; | | | | | |
| 2233; 2234; 24/25 | | | | | |
| 1118; 563938926; | 2319 | 3735 | 4575 | n/a | n/a |
| NZ_AYWX01000007.1; | | | | | |
| 2235; 2236; 26/27 | | | | | |
| 1119; 655133038; | 1826 | 3048 | n/a | n/a | n/a |
| NZ_AUCV01000014.1; | | | | | |
| 2237; 2238; 32/33 | | | | | |
| 1120; 947704650; | 2316 | 3731 | 4572 | n/a | n/a |
| NZ_LMID01000016.1; | | | | | |
| 2239; 2240; 22/23 | | | | | |
| 1121; 294505815; | 2153 | 2710 | 4001 | n/a | n/a |
| NC_014032.1; | | | | | |
| 2241; 2242; 21/22 | | | | | |
| 1122; 294505815; | 2153 | 2710 | 4001 | n/a | n/a |
| NC_014032.1; | | | | | |
| 2243; 2244; 18/19 | | | | | |
| 1123; 947919015; | 2318 | 3734 | 4574 | n/a | n/a |
| NZ_LMHP01000012.1; | | | | | |
| 2245; 2246; 26/27 | | | | | |
| 1124; 780791108; | n/a | 2518 | 3869 | n/a | n/a |
| LADS01000058.1; | | | | | |
| 2247; 2248; 22/23 | | | | | |
| 1125; 738999090; | 2176 | 3226 | 4342 | n/a | n/a |
| NZ_KK073873.1; | | | | | |
| 2249; 2250; 26/27 | | | | | |
| 1126; 408381849; | 1519 | 2604 | 3927 | n/a | n/a |
| NZ_AMPO01000004.1; | | | | | |
| 2251; 2252; 28/29 | | | | | |
| 1127; 338209545; | n/a | 2738 | n/a | n/a | n/a |
| NC_015703.1; | | | | | |
| 2253; 2254; 33/34 | | | | | |
| 1128; 294505815; | 2153 | 2710 | 4001 | n/a | n/a |
| NC_014032.1; | | | | | |
| 2255; 2256; 19/20 | | | | | |
| 1129; 294505815; | 2153 | 2710 | 4001 | n/a | n/a |
| NC_014032.1; | | | | | |
| 2257; 2258; 18/19 | | | | | |
| 1130; 427705465; | n/a | 2370 | 3777 | n/a | n/a |
| NC_019676.1; | | | | | |
| 2259; 2260; 35/36 | | | | | |
| 1131; 427705465; | n/a | 3493 | 4046 | n/a | n/a |
| NC_019676.1; | | | | | |
| 2261; 2262; 35/36 | | | | | |
| 1132; 640169055; | 1757 | 2958 | 4487 | n/a | n/a |
| NZ_JAFS01000002.1; | | | | | |
| 2263; 2264; 40/41 | | | | | |
| 1133; 943897669; | 2298 | 3707 | 4550 | n/a | n/a |
| NZ_LIQQ01000007.1; | | | | | |
| 2265; 2266; 21/22 | | | | | |
| 1134; 943674269; | 2296 | 3705 | 4548 | n/a | n/a |
| NZ_LIQO01000205.1; | | | | | |
| 2267; 2268; 21/22 | | | | | |
| 1135; 386348020; | 1587 | 2680 | 3978 | n/a | n/a |
| NC_017584.1; | | | | | |
| 2269; 2270; 36/37 | | | | | |
| 1136; 931421682; | 1473 | 2547 | 3889 | n/a | n/a |
| LJTQ01000030.1; | | | | | |
| 2271; 2272; 29/30 | | | | | |
| 1137; 890444402; | 2122 | 3497 | 4467 | n/a | n/a |
| NZ_CP011310.1; | | | | | |
| 2273; 2274; 30/31 | | | | | |
| 1138; 41582259; | 1316 | 2337 | n/a | n/a | n/a |
| AY458641.2; | | | | | |
| 2275; 2276; 42/43 | | | | | |
| 1139; 41582259; | 2021 | 2631 | n/a | n/a | n/a |
| AY458641.2; | | | | | |
| 2277; 2278; 42/43 | | | | | |
| 1140; 554634310; | n/a | 3555 | 4147 | n/a | n/a |
| NC_022600.1; | | | | | |
| 2279; 2280; 28/29 | | | | | |
| 1141; 947721816; | 2317 | 3732 | 4573 | n/a | n/a |
| NZ_LMIB01000001.1; | | | | | |
| 2281; 2282; 22/23 | | | | | |
| 1142; 554634310; | n/a | 2377 | 3784 | n/a | n/a |
| NC_022600.1; | | | | | |
| 2283; 2284; 28/29 | | | | | |
| 1143; 483724571; | n/a | 2854 | 4106 | n/a | n/a |
| NZ_KB904821.1; | | | | | |
| 2285; 2286; 26/27 | | | | | |
| 1144; 557835508; | 1743 | 2911 | 4149 | n/a | n/a |
| NZ_AWGE01000033.1; | | | | | |
| 2287; 2288; 25/26 | | | | | |
| 1145; 575082509; | 1432 | 2492 | 3860 | n/a | n/a |
| BAVS01000030.1; | | | | | |
| 2289; 2290; 19/20 | | | | | |
| 1146; 553739852; | 1906 | 2905 | 4143 | n/a | n/a |
| NZ_AWNH01000066.1; | | | | | |
| 2291; 2292; 33/34 | | | | | |
| 1147; 484345004; | 1667 | 2806 | 4078 | n/a | n/a |
| NZ_JH947126.1; | | | | | |
| 2293; 2294; 30/31 | | | | | |
| 1148; 482909235; | n/a | 2808 | n/a | n/a | n/a |
| NZ_JH980292.1; | | | | | |
| 2295; 2296; 32/33 | | | | | |
| 1149; 737370143; | 1947 | 3200 | 4330 | n/a | n/a |
| NZ_JQKI01000040.1; | | | | | |
| 2297; 2298; 18/19 | | | | | |
| 1150; 734983081; | n/a | 3180 | n/a | n/a | n/a |
| NZ_JSXI01000073.1; | | | | | |
| 2299; 2300; 24/25 | | | | | |
| 1151; 736965849; | 1941 | 3189 | 4324 | n/a | n/a |
| NZ_JMIW01000009.1; | | | | | |
| 2301; 2302; 26/27 | | | | | |
| 1152; 483219562; | 1697 | 2849 | 4103 | n/a | n/a |
| NZ_KB901875.1; | | | | | |
| 2303; 2304; 38/39 | | | | | |
| 1153; 326793322; | 1615 | 2727 | 4013 | n/a | n/a |
| NC_015276.1; | | | | | |
| 2305; 2306; 40/41 | | | | | |
| 1154; 347753732; | 1626 | 2744 | 4027 | n/a | n/a |
| NC_016024.1; | | | | | |
| 2307; 2308; 41/42 | | | | | |
| 1155; 947472882; | 2312 | 3726 | 4566 | n/a | n/a |
| NZ_LMRH01000002.1; | | | | | |
| 2309; 2310; 21/22 | | | | | |
| 1156; 953813788; | n/a | 3748 | n/a | n/a | n/a |
| NZ_LNBE01000002.1; | | | | | |
| 2311; 2312; 12/13 | | | | | |
| 1157; 943922224; | 2301 | 3710 | 4553 | n/a | n/a |
| NZ_LIQU01000122.1; | | | | | |
| 2313; 2314; 12/13 | | | | | |
| 1158; 944029528; | 2306 | 3717 | 4560 | n/a | n/a |
| NZ_LIQZ01000126.1; | | | | | |
| 2315; 2316; 12/13 | | | | | |
| 1159; 943898694; | 2299 | 3708 | 4551 | n/a | n/a |
| NZ_LIQN01000037.1; | | | | | |
| 2317; 2318; 19/20 | | | | | |
| 1160; 953813789; | n/a | 3749 | n/a | n/a | n/a |
| NZ_LNBE01000003.1; | | | | | |
| 2319; 2320; 49/50 | | | | | |
| 1161; 943881150; | 2297 | 3706 | 4549 | n/a | n/a |
| NZ_LIPP01000138.1; | | | | | |
| 2321; 2322; 35/36 | | | | | |
| 1162; 943927948; | 2302 | 3712 | 4555 | n/a | n/a |
| NZ_LIQV01000315.1; | | | | | |
| 2323; 2324; 24/25 | | | | | |
| 1163; 943949281; | 2303 | 3713 | 4556 | n/a | n/a |
| NZ_LIPN01000124.1; | | | | | |
| 2325; 2326; 21/22 | | | | | |
| 1164; 951121600; | 2327 | 3746 | 4585 | n/a | n/a |
| NZ_LMEQ01000031.1; | | | | | |
| 2327; 2328; 21/22 | | | | | |
| 1165; 944495433; | 2307 | 3720 | 4563 | n/a | n/a |
| NZ_LIRK01000018.1; | | | | | |
| 2329; 2330; 21/22 | | | | | |
| 1166; 943899498; | 2300 | 3709 | 4552 | n/a | n/a |
| NZ_LIQN01000384.1; | | | | | |
| 2331; 2332; 21/22 | | | | | |
| 1167; 483258918; | 1392 | 2443 | 3830 | n/a | n/a |
| NZ_AMFE01000033.1; | | | | | |
| 2333; 2334; 19/20 | | | | | |
| 1168; 483258918; | 1392 | 2443 | 3830 | n/a | n/a |
| NZ_AMFE01000033.1; | | | | | |
| 2335; 2336; 19/20 | | | | | |
| 1169; 944012845; | 2305 | 3715 | 4558 | n/a | n/a |
| NZ_LIPQ01000171.1; | | | | | |
| 2337; 2338; 40/41 | | | | | |
| 1170; 664052786; | 1874 | 3097 | 4270 | n/a | n/a |
| NZ_JOES01000014.1; | | | | | |
| 2339; 2340; 21/22 | | | | | |
| 1171; 652876473; | n/a | 2634 | 3947 | n/a | n/a |
| NZ_KI912267.1; | | | | | |
| 2341; 2342; 34/35 | | | | | |
| 1172; 959926096; | 1815 | 3036 | 4337 | n/a | n/a |
| NZ_LMTZ01000085.1; | | | | | |
| 2343; 2344; 21/22 | | | | | |
| 1173; 959868240; | 2329 | 3751 | 4165 | n/a | n/a |
| NZ_CP013252.1; | | | | | |
| 2345; 2346; 18/19 | | | | | |
| 1174; 483254584; | 2157 | 2881 | 4127 | n/a | n/a |
| NZ_KB902362.1; | | | | | |
| 2347; 2348; 42/43 | | | | | |
| 1175; 655990125; | 1831 | 3600 | 4510 | n/a | n/a |
| NZ_AUBC01000024.1; | | | | | |
| 2349; 2350; 26/27 | | | | | |
| 1176; 746187665; | 2219 | 3305 | 4365 | n/a | n/a |
| NZ_JWSY01000013.1; | | | | | |
| 2351; 2352; 12/13 | | | | | |
| 1177; 443625867; | 1518 | 2603 | 4356 | n/a | n/a |
| NZ_AMLP01000127.1; | | | | | |
| 2353; 2354; 20/21 | | | | | |
| 1178; 386284588; | 1551 | 2641 | 3952 | n/a | n/a |
| NZ_AJLE01000006.1; | | | | | |
| 2355; 2356; 26/27 | | | | | |
| 1179; 826051019; | 2244 | 3631 | 4446 | n/a | n/a |
| NZ_LDES01000074.1; | | | | | |
| 2357; 2358; 22/23 | | | | | |
| 1180; 312128809; | n/a | 2718 | n/a | n/a | n/a |
| NC_014655.1; | | | | | |
| 2359; 2360; 25/26 | | | | | |
| 1181; 482849861; | 1506 | 2589 | 3920 | n/a | n/a |
| NZ_AKBU01000001.1; | | | | | |
| 2361; 2362; 3/4 | | | | | |
| 1182; 879201007; | 1380 | 2427 | 3820 | n/a | n/a |
| CKIK01000005.1; | | | | | |
| 2363; 2364; 19/20 | | | | | |
| 1183; 482849861; | 1585 | 2677 | 3963 | n/a | n/a |
| NZ_AKBU01000001.1; | | | | | |
| 2365; 2366; 3/4 | | | | | |
| 1184; 835319962; | 2213 | 3474 | 4447 | n/a | n/a |
| NZ_JTLD01000119.1; | | | | | |
| 2367; 2368; 22/23 | | | | | |
| 1185; 766607514; | 1839 | 3426 | 4421 | n/a | n/a |
| NZ_JTHO01000003.1; | | | | | |
| 2369; 2370; 20/21 | | | | | |
| 1186; 671525382; | n/a | 3130 | 4496 | n/a | n/a |
| NZ_JODL01000019.1; | | | | | |
| 2371; 2372; 31/32 | | | | | |
| 1187; 146276058; | 1591 | 2691 | 3986 | n/a | n/a |
| NC_009428.1; | | | | | |
| 2373; 2374; 32/33 | | | | | |
| 1188; 563938926; | 1620 | 2736 | 4021 | n/a | n/a |
| NZ_AYWX01000007.1; | | | | | |
| 2375; 2376; 26/27 | | | | | |
| 1189; 739662450; | n/a | n/a | n/a | n/a | n/a |
| NZ_JNFD01000038.1; | | | | | |
| 2377; 2378; 20/21 | | | | | |
| 1190; 739662450; | 1444 | n/a | n/a | n/a | n/a |
| NZ_JNFD01000038.1; | | | | | |
| 2379; 2380; 20/21 | | | | | |
| 1191; 906292938; | 1740 | 2909 | n/a | n/a | n/a |
| CXPB01000073.1; | | | | | |
| 2381; 2382; 18/19 | | | | | |
| 1192; 653556699; | 1813 | 3034 | n/a | n/a | n/a |
| NZ_AUEZ01000087.1; | | | | | |
| 2383; 2384; 26/27 | | | | | |
| 1193; 844809159; | 2107 | 3479 | 4450 | n/a | n/a |
| NZ_LDPH01000011.1; | | | | | |
| 2385; 2386; 20/21 | | | | | |
| 1194; 483961722; | n/a | 2988 | n/a | n/a | n/a |
| NZ_KB890915.1; | | | | | |
| 2387; 2388; 71/72 | | | | | |
| 1195; 739487309; | n/a | 3235 | n/a | n/a | 4504 |
| NZ_JPLW01000007.1; | | | | | |
| 2389; 2390; 27/28 | | | | | |
| 1196; 921170702; | 1884 | 3456 | n/a | n/a | n/a |
| NZ_CP009922.2; | | | | | |
| 2391; 2392; 13/14 | | | | | |
| 1197; 644043488; | 1764 | 3202 | 4174 | n/a | n/a |
| NZ_AZUQ01000001.1; | | | | | |
| 2393; 2394; 19/20 | | | | | |
| 1198; 921170702; | 1356 | 2390 | n/a | n/a | n/a |
| NZ_CP009922.2; | | | | | |
| 2395; 2396; 13/14 | | | | | |
| 1199; 254392242; | 1513 | 2598 | 3922 | n/a | n/a |
| NZ_DS570678.1; | | | | | |
| 2397; 2398; 39/40 | | | | | |
| 1200; 483975550; | 2158 | 3263 | n/a | n/a | n/a |
| NZ_KB892001.1; | | | | | |
| 2399; 2400; 30/31 | | | | | |
| 1201; 550281965; | n/a | 3336 | n/a | n/a | n/a |
| NZ_ASSJ01000070.1; | | | | | |
| 2401; 2402; 27/28 | | | | | |
| 1202; 291297538; | 1330 | 2355 | n/a | n/a | n/a |
| NC_013947.1; | | | | | |
| 2403; 2404; 29/30 | | | | | |
| 1203; 662129456; | n/a | 3532 | n/a | n/a | n/a |
| NZ_KL573544.1; | | | | | |
| 2405; 2406; 28/29 | | | | | |
| 1204; 291297538; | 1606 | 3362 | 4389 | n/a | n/a |
| NC_013947.1; | | | | | |
| 2407; 2408; 29/30 | | | | | |
| 1205; 484015294; | 1777 | 2826 | 4091 | n/a | n/a |
| NZ_ANAX01000026.1; | | | | | |
| 2409; 2410; 29/30 | | | | | |
| 1206; 655370026; | 2166 | 3051 | 4223 | n/a | n/a |
| NZ_ATZF01000001.1; | | | | | |
| 2411; 2412; 21/22 | | | | | |
| 1207; 484016825; | n/a | 2827 | n/a | n/a | n/a |
| NZ_ANAY01000003.1; | | | | | |
| 2413; 2414; 22/23 | | | | | |
| 1208; 926283036; | n/a | 3650 | n/a | n/a | n/a |
| NZ_LGEC01000103.1; | | | | | |
| 2415; 2416; 66/67 | | | | | |
| 1209; 408675720; | 1636 | 2757 | n/a | n/a | n/a |
| NC_018750.1; | | | | | |
| 2417; 2418; 27/28 | | | | | |
| 1210; 254387191; | 1554 | 3634 | n/a | n/a | n/a |
| NZ_DS570483.1; | | | | | |
| 2419; 2420; 27/28 | | | | | |
| 1211; 772744565; | n/a | 2517 | 3868 | n/a | n/a |
| NZ_JYJG01000059.1; | | | | | |
| 2421; 2422; 33/34 | | | | | |
| 1212; 919531973; | 2243 | 3627 | 4519 | n/a | n/a |
| NZ_JOEK01000003.1; | | | | | |
| 2423; 2424; 25/26 | | | | | |
| 1213; 671498318; | 2194 | 3580 | n/a | n/a | n/a |
| NZ_JOFR01000042.1; | | | | | |
| 2425; 2426; 23/24 | | | | | |
| 1214; 671498318; | 2194 | 3580 | n/a | n/a | n/a |
| NZ_JOFR01000042.1; | | | | | |
| 2427; 2428; 34/35 | | | | | |
| 1215; 514917321; | 1660 | 2796 | 4072 | n/a | n/a |
| NZ_AOPZ01000063.1; | | | | | |
| 2429; 2430; 37/38 | | | | | |
| 1216; 739097522; | 2174 | 3227 | n/a | n/a | n/a |
| NZ_KI911740.1; | | | | | |
| 2431; 2432; 28/29 | | | | | |
| 1217; 665618015; | 2187 | 3567 | 4310 | n/a | n/a |
| NZ_JODR01000032.1; | | | | | |
| 2433; 2434; 40/41 | | | | | |
| 1218; 926412094; | n/a | 3662 | n/a | n/a | 4532 |
| NZ_LGDY01000103.1; | | | | | |
| 2435; 2436; 30/31 | | | | | |
| 1219; 935540718; | n/a | 2544 | n/a | n/a | n/a |
| NZ_LGJH01000063.1; | | | | | |
| 2437; 2438; 23/24 | | | | | |
| 1220; 665536304; | 2195 | 3582 | 4297 | n/a | n/a |
| NZ_JOCD01000152.1; | | | | | |
| 2439; 2440; 35/36 | | | | | |
| 1221; 665618015; | 2187 | 3564 | 4310 | n/a | n/a |
| NZ_JODR01000032.1; | | | | | |
| 2441; 2442; 40/41 | | | | | |
| 1222; 772744565; | n/a | 3431 | 4425 | n/a | n/a |
| NZ_JYJG01000059.1; | | | | | |
| 2443; 2444; 33/34 | | | | | |
| 1223; 483112234; | 2212 | 2798 | n/a | n/a | n/a |
| NZ_AGVX02000406.1; | | | | | |
| 2445; 2446; 24/25 | | | | | |
| 1224; 739372122; | n/a | n/a | 3865 | n/a | n/a |
| NZ_JQHE01000003.1; | | | | | |
| 2447; 2448; 11/12 | | | | | |
| 1225; 739372122; | n/a | n/a | 3865 | n/a | n/a |
| NZ_JQHE01000003.1; | | | | | |
| 2449; 2450; 13/14 | | | | | |
| 1226; 664360925; | 2197 | 3114 | 4285 | n/a | n/a |
| NZ_JOGD01000054.1; | | | | | |
| 2451; 2452; 25/26 | | | | | |
| 1227; 358468594; | n/a | 2669 | n/a | n/a | n/a |
| NZ_FR873693.1; | | | | | |
| 2453; 2454; 14/15 | | | | | |
| 1228; 358468594; | n/a | 2669 | n/a | n/a | n/a |
| NZ_FR873693.1; | | | | | |
| 2455; 2456; 26/27 | | | | | |
| 1229; 358468601; | 1580 | 2670 | n/a | n/a | n/a |
| NZ_FR873700.1; | | | | | |
| 2457; 2458; 69/70 | | | | | |
| 1230; 663199697; | n/a | 3082 | n/a | n/a | n/a |
| NZ_JOHO01000012.1; | | | | | |
| 2459; 2460; 30/31 | | | | | |
| 1231; 665671804; | 2145 | 3538 | 4308 | n/a | n/a |
| NZ_JOCK01000052.1; | | | | | |
| 2461; 2462; 40/41 | | | | | |
| 1232; 254387191; | 1388 | 2436 | n/a | n/a | n/a |
| NZ_DS570483.1; | | | | | |
| 2463; 2464; 27/28 | | | | | |
| 1233; 224581098; | 1557 | 2648 | n/a | n/a | n/a |
| NZ_GG657748.1; | | | | | |
| 2465; 2466; 35/36 | | | | | |
| 1234; 110677421; | 1589 | 2685 | 3982 | n/a | n/a |
| NC_008209.1; | | | | | |
| 2467; 2468; 22/23 | | | | | |
| 1235; 563312125; | 1588 | 2682 | n/a | n/a | n/a |
| AYTZ01000052.1; | | | | | |
| 2469; 2470; 31/32 | | | | | |
| 1236; 935540718; | n/a | 3686 | n/a | n/a | n/a |
| NZ_LGJH01000063.1; | | | | | |
| 2471; 2472; 23/24 | | | | | |
| 1237; 326336949; | n/a | 2659 | n/a | n/a | n/a |
| NZ_CM001018.1; | | | | | |
| 2473; 2474; 35/36 | | | | | |
| 1238; 663670981; | n/a | 3092 | n/a | n/a | 4262 |
| NZ_JODQ01000007.1; | | | | | |
| 2475; 2476; 20/21 | | | | | |
| 1239; 546154317; | n/a | n/a | n/a | n/a | n/a |
| NZ_ACVN02000045.1; | | | | | |
| 2477; 2478; 18/19 | | | | | |
| 1240; 563312125; | 1588 | 3211 | n/a | n/a | n/a |
| AYTZ01000052.1; | | | | | |
| 2479; 2480; 31/32 | | | | | |
| 1241; 483258918; | 1392 | 2443 | 3830 | n/a | n/a |
| NZ_AMFE01000033.1; | | | | | |
| 2481; 2482; 19/20 | | | | | |
| 1242; 483258918; | 1392 | 2443 | 3830 | n/a | n/a |
| NZ_AMFE01000033.1; | | | | | |
| 2483; 2484; 19/20 | | | | | |
| 1243; 820820518; | 2237 | 3624 | n/a | n/a | n/a |
| NZ_KQ061219.1; | | | | | |
| 2485; 2486; 31/32 | | | | | |
| 1244; 514348304; | 1657 | 2795 | n/a | n/a | n/a |
| NZ_ASQH01000001.1; | | | | | |
| 2487; 2488; 26/27 | | | | | |
| 1245; 928675838; | 1386 | 2434 | n/a | n/a | n/a |
| CYTQ01000003.1; | | | | | |
| 2489; 2490; 27/28 | | | | | |
| 1246; 652698054; | 1793 | 3009 | 4198 | n/a | n/a |
| NZ_KI912610.1; | | | | | |
| 2491; 2492; 26/27 | | | | | |
| 1247; 759875025; | n/a | 3400 | n/a | n/a | n/a |
| NZ_JONS01000016.1; | | | | | |
| 2493; 2494; 12/13 | | | | | |
| 1248; 664141438; | n/a | 3584 | n/a | n/a | n/a |
| NZ_JOJM01000019.1; | | | | | |
| 2495; 2496; 29/30 | | | | | |
| 1249; 483258918; | 1392 | 2443 | 3830 | n/a | n/a |
| NZ_AMFE01000033.1; | | | | | |
| 2497; 2498; 19/20 | | | | | |
| 1250; 483258918; | 1392 | 2443 | 3830 | n/a | n/a |
| NZ_AMFE01000033.1; | | | | | |
| 2499; 2500; 19/20 | | | | | |
| 1251; 929862756; | 1732 | 2897 | 4137 | n/a | n/a |
| NZ_LGKI01000090.1; | | | | | |
| 2501; 2502; 27/28 | | | | | |
| 1252; 378759075; | 1575 | 2664 | 3966 | n/a | n/a |
| NZ_AFXE01000029.1; | | | | | |
| 2503; 2504; 22/23 | | | | | |
| 1253; 484005069; | n/a | 3551 | n/a | n/a | n/a |
| NZ_KB894416.1; | | | | | |
| 2505; 2506; 18/19 | | | | | |
| 1254; 563478461; | n/a | 2932 | 4154 | n/a | n/a |
| NZ_AYVQ01000029.1; | | | | | |
| 2507; 2508; 30/31 | | | | | |
| 1255; 482984722; | 1780 | 2848 | n/a | n/a | n/a |
| NZ_KB900605.1; | | | | | |
| 2509; 2510; 23/24 | | | | | |
| 1256; 563478461; | n/a | 2923 | 4156 | n/a | n/a |
| NZ_AYVQ01000029.1; | | | | | |
| 2511; 2512; 30/31 | | | | | |
| 1257; 563478461; | n/a | 2920 | 4156 | n/a | n/a |
| NZ_AYVQ01000029.1; | | | | | |
| 2513; 2514; 30/31 | | | | | |
| 1258; 563478461; | n/a | 2917 | 4154 | n/a | n/a |
| NZ_AYVQ01000029.1; | | | | | |
| 2515; 2516; 30/31 | | | | | |
| 1259; 563478461; | n/a | 2940 | 4161 | n/a | n/a |
| NZ_AYVQ01000029.1; | | | | | |
| 2517; 2518; 30/31 | | | | | |
| 1260; 563478461; | n/a | 2924 | 4158 | n/a | n/a |
| NZ_AYVQ01000029.1; | | | | | |
| 2519; 2520; 30/31 | | | | | |
| 1261; 563478461; | n/a | 2933 | 4154 | n/a | n/a |
| NZ_AYVQ01000029.1; | | | | | |
| 2521; 2522; 30/31 | | | | | |
| 1262; 563478461; | n/a | 2926 | 4156 | n/a | n/a |
| NZ_AYVQ01000029.1; | | | | | |
| 2523; 2524; 30/31 | | | | | |
| 1263; 563312125; | 1426 | 2482 | n/a | n/a | n/a |
| AYTZ01000052.1; | | | | | |
| 2525; 2526; 31/32 | | | | | |
| 1264; 563478461; | n/a | 2928 | 4154 | n/a | n/a |
| NZ_AYVQ01000029.1; | | | | | |
| 2527; 2528; 30/31 | | | | | |
| 1265; 652698054; | 1800 | 3014 | 4202 | n/a | n/a |
| NZ_KI912610.1; | | | | | |
| 2529; 2530; 26/27 | | | | | |
| 1266; 652698054; | 1796 | 3011 | 4200 | n/a | n/a |
| NZ_KI912610.1; | | | | | |
| 2531; 2532; 26/27 | | | | | |
| 1267; 484023389; | 2154 | 2832 | n/a | n/a | n/a |
| NZ_ANBF01000087.1; | | | | | |
| 2533; 2534; 24/25 | | | | | |
| 1268; 655569633; | 1971 | 3057 | 4491 | n/a | n/a |
| NZ_JIAI01000002.1; | | | | | |
| 2535; 2536; 32/33 | | | | | |
| 1269; 655569633; | 1971 | 3057 | 4491 | n/a | n/a |
| NZ_JIAI01000002.1; | | | | | |
| 2537; 2538; 43/44 | | | | | |
| 1270; 655569633; | 1971 | 3057 | 4491 | n/a | n/a |
| NZ_JIAI01000002.1; | | | | | |
| 2539; 2540; 32/33 | | | | | |
| 1271; 563478461; | n/a | 2925 | 4158 | n/a | n/a |
| NZ_AYVQ01000029.1; | | | | | |
| 2541; 2542; 30/31 | | | | | |
| 1272; 740292158; | 2186 | 3276 | 4361 | n/a | n/a |
| NZ_AUNB01000028.1; | | | | | |
| 2543; 2544; 22/23 | | | | | |
| 1273; 563478461; | n/a | 2921 | 4157 | n/a | n/a |
| NZ_AYVQ01000029.1; | | | | | |
| 2545; 2546; 30/31 | | | | | |
| 1274; 563478461; | n/a | 2930 | 4154 | n/a | n/a |
| NZ_AYVQ01000029.1; | | | | | |
| 2547; 2548; 30/31 | | | | | |
| 1275; 563478461; | n/a | 2927 | 4154 | n/a | n/a |
| NZ_AYVQ01000029.1; | | | | | |
| 2549; 2550; 30/31 | | | | | |
| 1276; 563478461; | n/a | 2918 | 4155 | n/a | n/a |
| NZ_AYVQ01000029.1; | | | | | |
| 2551; 2552; 30/31 | | | | | |
| 1277; 740220529; | 2185 | 3274 | 4495 | n/a | n/a |
| NZ_JHEH01000002.1; | | | | | |
| 2553; 2554; 13/14 | | | | | |
| 1278; 563478461; | n/a | 2919 | 4154 | n/a | n/a |
| NZ_AYVQ01000029.1; | | | | | |
| 2555; 2556; 30/31 | | | | | |
| 1279; 483454700; | 1722 | 2987 | 4128 | n/a | n/a |
| NZ_KB903974.1; | | | | | |
| 2557; 2558; 31/32 | | | | | |
| 1280; 835355240; | 2103 | 3475 | n/a | n/a | n/a |
| NZ_KN549147.1; | | | | | |
| 2559; 2560; 13/14 | | | | | |
| 1281; 563478461; | n/a | 2929 | 4154 | n/a | n/a |
| NZ_AYVQ01000029.1; | | | | | |
| 2561; 2562; 30/31 | | | | | |
| 1282; 563478461; | n/a | 2944 | 4158 | n/a | n/a |
| NZ_AYVQ01000029.1; | | | | | |
| 2563; 2564; 30/31 | | | | | |
| 1283; 652698054; | 1921 | 3158 | 3972 | n/a | n/a |
| NZ_KI912610.1; | | | | | |
| 2565; 2566; 26/27 | | | | | |
| 1284; 563478461; | n/a | 2931 | 4154 | n/a | n/a |
| NZ_AYVQ01000029.1; | | | | | |
| 2567; 2568; 30/31 | | | | | |
| 1285; 563478461; | n/a | 2943 | 4154 | n/a | n/a |
| NZ_AYVQ01000029.1; | | | | | |
| 2569; 2570; 30/31 | | | | | |
| 1286; 652879634; | 1802 | 3019 | 4204 | n/a | n/a |
| NZ_AZUY01000007.1; | | | | | |
| 2571; 2572; 26/27 | | | | | |
| 1287; 652698054; | 1795 | 3010 | 4199 | n/a | n/a |
| NZ_KI912610.1; | | | | | |
| 2573; 2574; 26/27 | | | | | |
| 1288; 563478461; | n/a | 2922 | 4154 | n/a | n/a |
| NZ_AYVQ01000029.1; | | | | | |
| 2575; 2576; 30/31 | | | | | |
| 1289; 652698054; | 1803 | 3020 | 4205 | n/a | n/a |
| NZ_KI912610.1; | | | | | |
| 2577; 2578; 26/27 | | | | | |
| 1290; 563478461; | n/a | 3012 | 4154 | n/a | n/a |
| NZ_AYVQ01000029.1; | | | | | |
| 2579; 2580; 30/31 | | | | | |
| 1291; 563478461; | n/a | 2945 | 4154 | n/a | n/a |
| NZ_AYVQ01000029.1; | | | | | |
| 2581; 2582; 30/31 | | | | | |
| 1292; 652698054; | 1582 | 2673 | 3972 | n/a | n/a |
| NZ_KI912610.1; | | | | | |
| 2583; 2584; 26/27 | | | | | |
| 1293; 563478461; | n/a | 2942 | 4154 | n/a | n/a |
| NZ_AYVQ01000029.1; | | | | | |
| 2585; 2586; 30/31 | | | | | |
| 1294; 652698054; | 1798 | 3013 | 4201 | n/a | n/a |
| NZ_KI912610.1; | | | | | |
| 2587; 2588; 26/27 | | | | | |
| 1295; 563938926; | 2147 | 2941 | 4162 | n/a | n/a |
| NZ_AYWX01000007.1; | | | | | |
| 2589; 2590; 26/27 | | | | | |
| 1296; 483314733; | 1699 | 2851 | n/a | n/a | n/a |
| NZ_KB902785.1; | | | | | |
| 2591; 2592; 13/14 | | | | | |
| 1297; 652698054; | 1716 | 2875 | 4120 | n/a | n/a |
| NZ_KI912610.1; | | | | | |
| 2593; 2594; 26/27 | | | | | |
| 1298; 652698054; | 1920 | 2954 | 4009 | n/a | n/a |
| NZ_KI912610.1; | | | | | |
| 2595; 2596; 26/27 | | | | | |
| 1299; 652670206; | 1791 | 3008 | 4197 | n/a | n/a |
| NZ_AUEL01000005.1; | | | | | |
| 2597; 2598; 26/27 | | | | | |
| 1300; 657698352; | 1739 | 2908 | n/a | n/a | n/a |
| NZ_JDWO01000067.1; | | | | | |
| 2599; 2600; 25/26 | | | | | |
| 1301; 653526890; | 1961 | 3033 | n/a | n/a | n/a |
| NZ_AXAZ01000002.1; | | | | | |
| 2601; 2602; 26/27 | | | | | |
| 1302; 433771415; | 1749 | 2937 | 4056 | n/a | n/a |
| NC_019973.1; | | | | | |
| 2603; 2604; 26/27 | | | | | |
| 1303; 433771415; | 1749 | 2938 | 4056 | n/a | n/a |
| NC_019973.1; | | | | | |
| 2605; 2606; 26/27 | | | | | |
| 1304; 433771415; | 1641 | 2768 | 4056 | n/a | n/a |
| NC_019973.1; | | | | | |
| 2607; 2608; 26/27 | | | | | |
| 1305; 657698352; | 1739 | 3069 | n/a | n/a | n/a |
| NZ_JDWO01000067.1; | | | | | |
| 2609; 2610; 25/26 | | | | | |
| 1306; 339501577; | 1622 | 2739 | 4023 | n/a | n/a |
| NC_015730.1; | | | | | |
| 2611; 2612; 22/23 | | | | | |
| 1307; 639168743; | 1755 | 2955 | n/a | n/a | n/a |
| NZ_AWZU01000010.1; | | | | | |
| 2613; 2614; 21/22 | | | | | |
| 1308; 433771415; | 1749 | 2935 | 4056 | n/a | n/a |
| NC_019973.1; | | | | | |
| 2615; 2616; 26/27 | | | | | |
| 1309; 484075173; | n/a | 2801 | n/a | n/a | 4076 |
| NZ_AJLK01000109.1; | | | | | |
| 2617; 2618; 27/28 | | | | | |
| 1310; 906292938; | 1384 | 2432 | n/a | n/a | n/a |
| CXPB01000073.1; | | | | | |
| 2619; 2620; 18/19 | | | | | |
| 1311; 652912253; | 1962 | 3021 | 4206 | n/a | n/a |
| NZ_ATYO01000004.1; | | | | | |
| 2621; 2622; 26/27 | | | | | |
| 1312; 906292938; | 2018 | 3332 | n/a | n/a | n/a |
| CXPB01000073.1; | | | | | |
| 2623; 2624; 18/19 | | | | | |
| 1313; 970574347; | 1768 | 2814 | 4084 | n/a | n/a |
| NZ_LNZF01000001.1; | | | | | |
| 2625; 2626; 20/21 | | | | | |
| 1314; 970574347; | 2001 | 3307 | 4074 | n/a | n/a |
| NZ_LNZF01000001.1; | | | | | |
| 2627; 2628; 20/21 | | | | | |
| 1315; 970574347; | 1768 | 3129 | 4084 | n/a | n/a |
| NZ_LNZF01000001.1; | | | | | |
| 2629; 2630; 20/21 | | | | | |

TABLE 3
Exemplary Lasso Peptidase
Lasso Peptidase Peptide No: #; Species of Origin; GI#; Accession#

1316; Uncultured marine bacterium 463 clone EBAC080-L32B05 genomic
sequence; 41582259; AY458641.2
1317; Burkholderia pseudomallei 1710b chromosome I, complete sequence;
76808520; NC_007434.1
1318; Burkholderia thailandensis E555 BTHE555_314, whole genome
shotgun sequence; 485035557; NZ_AECN01000315.1
1319; Frankia sp. CcI6 CcI6DRAFT_scaffold_51.52, whole genome shotgun
sequence; 563312125; AYTZ01000052.1
1320; Sphingopyxis alaskensis RB2256, complete genome; 103485498;
NC_008048.1
1321; Sphingopyxis alaskensis RB2256, complete genome; 103485498;
NC_008048.1
1322; Streptococcus suis SC84 complete genome, strain SC84; 253750923;
NC_012924.1
1323; Geobacter uraniireducens Rf4, complete genome; 148262085; NC_009483.1
1324; Caulobacter sp. K31, complete genome; 167643973; NC_010338.1
1325; Phenylobacterium zucineum HLK1, complete genome; 196476886;
CP000747.1
1326; Phenylobacterium zucineum HLK1, complete genome; 196476886;
CP000747.1
1327; Sanguibacter keddieii DSM 10542, complete genome; 269793358;
NC_013521.1
1328; Xylanimonas cellulosilytica DSM 15894, complete genome;
269954810; NC_013530.1
1329; Spirosoma linguale DSM 74, complete genome; 283814236;
CP001769.1
1330; Stackebrandtia nassauensis DSM 44728, complete genome; 291297538;
NC_013947.1
1331; Caulobacter segnis ATCC 21756, complete genome; 295429362;
CP002008.1
1332; Streptomyces bingchenggensis BCW-1, complete genome; 374982757;
NC_016582.1
1333; Gallionella capsiferriformans ES-2, complete genome; 302877245;
NC_014394.1
1334; Asticcacaulis excentricus CB 48 chromosome 1, complete sequence;
315497051; NC_014816.1
1335; Burkholderia gladioli BSR3 chromosome 1, complete sequence;
327367349; CP002599.1
1336; Sphingobium chlorophenolicum L-1 chromosome 1, complete
sequence; 334100279; CP002798.1
1337; Streptomyces violaceusniger Tu 4113, complete genome; 345007964;
NC_015957.1
1338; Rhodospirillum rubrum F11, complete genome; 386348020; NC_017584.1
1339; Actinoplanes sp. SE50/110, complete genome; 386845069; NC_017803.1
1340; Bacillus thuringiensis MC28, complete genome; 407703236; NC_018693.1
1341; Desulfocapsa sulfexigens DSM 10523, complete genome; 451945650;
NC_020304.1
1342; Xanthomonas citri pv. punicae str. LMG 859, whole genome shotgun
sequence; 390991205; NZ_CAGJ01000031.1
1343; Streptomyces fulvissimus DSM 40593, complete genome; 488607535;
NC_021177.1
1344; Streptomyces rapamycinicus NRRL 5491 genome; 521353217;
CP006567.1
1345; Kutzneria albida strain NRRL B-24060 contig305.1, whole genome
shotgun sequence; 662161093; NZ_JNYH01000515.1
1346; Mesorhizobium huakuii 7653R genome; 657121522; CP006581.1
1347; Mesorhizobium huakuii 7653R genome; 657121522; CP006581.1
1348; Burkholderia thailandensis E555 BTHE555_314, whole genome
shotgun sequence; 485035557; NZ_AECN01000315.1
1349; Sphingopyxis fribergensis strain Kp5.2, complete genome; 749188513;
NZ_CP009122.1
1350; Sphingopyxis fribergensis strain Kp5.2, complete genome; 749188513;
NZ_CP009122.1
1351; Streptomyces sp. ZJ306 hydroxylase, deacetylase, and hypothetical
proteins genes, complete cds; ikarugamycin gene cluster, complete sequence;
and GCN5-related N-acetyltransferase, hypothetical protein, asparagine
synthase, transcriptional regulator, ABC transporter, hypothetical proteins,
putative membrane transport protein, putative acetyltransferase, cytochrome
P450, putative alpha-glucosidase, phosphoketolase, helix-turn-helix domain-
containing protein, membrane protein, NAD-dependent epimera; 746616581;
KF954512.1
1352; Streptomyces albus strain DSM 41398, complete genome; 749658562;
NZ_CP010519.1
1353; Amycolatopsis lurida NRRL 2430, complete genome; 755908329;
CP007219.1
1354; Streptomyces lydicus A02, complete genome; 822214995; NZ_CP007699.1
1355; Streptomyces lydicus A02, complete genome; 822214995; NZ_CP007699.1
1356; Streptomyces xiamenensis strain 318, complete genome; 921170702;
NZ_CP009922.2
1357; Streptomyces sp. PBH53 genome; 852460626; CP011799.1
1358; Streptomyces sp. PBH53 genome; 852460626; CP011799.1
1359; Streptomyces sp. PBH53 genome; 852460626; CP011799.1
1360; Sphingopyxis sp. 113P3, complete genome; 924898949; NZ_CP009452.1
1361; Sphingopyxis sp. 113P3, complete genome; 924898949; NZ_CP009452.1
1362; Nostoc piscinale CENA21 genome; 930349143; CP012036.1
1363; Sphingopyxis macrogoltabida strain 203, complete genome; 938956730;
NZ_CP009429.1
1364; Sphingopyxis macrogoltabida strain 203 plasmid, complete sequence;
938956814; NZ_CP009430.1
1365; Paenibacillus sp. 32O-W, complete genome; 961447255; CP013653.1
1366; Streptomyces avermitilis MA-4680 = NBRC 14893, complete genome;
162960844; NC_003155.4
1367; Kitasatospora setae KM-6054 DNA, complete genome; 357386972;
NC_016109.1
1368; Rhodococcus jostii lariatin biosynthetic gene cluster (larA, larB, larC,
larD, larE), complete cds; 380356103; AB593691.1
1369; Rubrivivax gelatinosus IL144 DNA, complete genome; 383755859;
NC_017075.1
1370; Fischerella thennalis PCC7521 contig00099, whole genome shotgun
sequence; 484076371; NZ_AJLL01000098.1
1371; Streptococcus suis SC84 complete genome, strain SC84; 253750923;
NC_012924.1
1372; Enterococcus faecalis ATCC 29212 contig24, whole genome shotgun
sequence; 401673929; ALOD01000024.1
1373; Roseburia sp. CAG: 197 WGS project CBBL01000000 data, contig,
whole genome shotgun sequence; 524261006; CBBL010000225.1
1374; Clostridium sp. CAG: 221 WGS project CBDC01000000 data, contig,
whole genome shotgun sequence; 524362382; CBDC010000065.1
1375; Clostridium sp. CAG: 411 WGS project CBIY01000000 data, contig,
whole genome shotgun sequence; 524742306; CBIY010000075.1
1376; Novosphingobium sp. KN65.2 WGS project CCBH000000000 data,
contig SPHv1_Contig_228, whole genome shotgun sequence; 808402906;
CCBH010000144.1
1377; Mesorhizobium plurifarium genome assembly Mesorhizobium
plurifarium ORS1032T genome assembly, contig MPL1032_Contig_21,
whole genome shotgun sequence; 927916006; CCND01000014.1
1378; Kibdelosporangium sp. MJ126-NF4, whole genome shotgun sequence;
754819815; NZ_CDME01000002.1
1379; Methanobacterium formicicum genome assembly isolate Mb9,
chromosome: I; 952971377; LN734822.1
1380; Streptococcus pneumoniae strain 37, whole genome shotgun sequence;
912676034; NZ_CMPZ01000004.1
1381; Streptococcus pneumoniae strain type strain: N, whole genome shotgun
sequence; 950938054; NZ_CIHL01000007.1
1382; Streptococcus pneumoniae strain 37, whole genome shotgun sequence;
912676034; NZ_CMPZ01000004.1
1383; Klebsiella variicola genome assembly Kv4880, contig
BN1200_Contig_75, whole genome shotgun sequence; 906292938;
CXPB01000073.1
1384; Klebsiella variicola genome assembly KvT29A, contig
BN1200_Contig_98, whole genome shotgun sequence; 906304012;
CXPA01000125.1
1385; Bacillus cereus genome assembly Bacillus JRS4, contig contig000025,
whole genome shotgun sequence; 924092470; CYHM01000025.1
1386; Achromobacter sp. 2789STDY5663426 genome assembly, contig:
ERS372662SCcontig000003, whole genome shotgun sequence; 928675838;
CYTQ01000003.1
1387; Pedobacter sp. BAL39 1103467000492, whole genome shotgun
sequence; 149277373; NZ_ABCM01000005.1
1388; Streptomyces sp. Mg1 supercont1.100, whole genome shotgun
sequence; 254387191; NZ_DS570483.1
1389; Streptomyces sviceus ATCC 29083 chromosome, whole genome
shotgun sequence; 297196766; NZ_CM000951.1
1390; Streptomyces pristinaespiralis ATCC 25486 chromosome, whole
genome shotgun sequence; 297189896; NZ_CM000950.1
1391; Streptomyces roseosporus NRRL 15998 supercont3.1 genomic scaffold,
whole genome shotgun sequence; 221717172; DS999644.1
1392; Streptococcus vestibularis F0396 ctg1126932565723, whole genome
shotgun sequence; 311100538; AEKO01000007.1
1393; Ruminococcus albus 8 contig00035, whole genome shotgun sequence;
325680876; NZ_ADKM02000123.1
1394; Streptomyces sp. W007 contig00293, whole genome shotgun sequence;
365867746; NZ_AGSW01000272.1
1395; Burkholderia pseudomallei 1258a Contig0089, whole genome shotgun
sequence; 418540998; NZ_AHJB01000089.1
1396; Burkholderia pseudomallei 1258a Contig0089, whole genome shotgun
sequence; 418540998; NZ_AHJB01000089.1
1397; Rhodanobacter sp. 115 contig437, whole genome shotgun sequence;
389759651; NZ_AJXS01000437.1
1398; Rhodanobacter thiooxydans LCS2 contig057, whole genome shotgun
sequence; 389809081; NZ_AJXW01000057.1
1399; Burkholderia thailandensis MSMB43 Scaffold3, whole genome shotgun
sequence; 424903876; NZ_JH692063.1
1400; Streptomyces auratus AGR0001 Scaffold1_85, whole genome shotgun
sequence; 396995461; AJGV01000085.1
1401; Uncultured bacterium ACD_75C02634, whole genome shotgun
sequence; 406886663; AMFJ01033303.1
1402; Amycolatopsis decaplanina DSM 44594 Contig0055, whole genome
shotgun sequence; 458848256; NZ_AOHO01000055.1
1403; Streptomyces mobaraensis NBRC 13819 = DSM 40847 contig024,
whole genome shotgun sequence; 458977979; NZ_AORZ01000024.1
1404; Burkholderia mallei GB8 horse 4 contig_394, whole genome shotgun
sequence; 67639376; NZ_AAHO01000116.1
1405; Enterococcus faecalis EnGen0363 strain RMC5 acAqY-supercont1.4,
whole genome shotgun sequence; 502232520; NZ_KB944632.1
1406; Enterococcus faecalis EnGen0233 strain UAA1014 acvJV-supercont1.10.C18,
whole genome shotgun sequence; 487281881; AIZW01000018.1
1407; Pandoraea sp. SD6-2 scaffold29, whole genome shotgun sequence;
505733815; NZ_KB944444.1
1408; Streptomyces aurantiacus JA 4570 Seq28, whole genome shotgun
sequence; 514916412; NZ_AOPZ01000028.1
1409; Streptomyces aurantiacus JA 4570 Seq17, whole genome shotgun
sequence; 514916021; NZ_AOPZ01000017.1
1410; Enterococcus faecalis LA3B-2 Scaffold22, whole genome shotgun
sequence; 522837181; NZ_KE352807.1
1411; Paenibacillus alvei A6-6i-x PAAL66ix_14, whole genome shotgun
sequence; 528200987; ATMS01000061.1
1412; Dehalobacter sp. UNSWDHB Contig_139, whole genome shotgun
sequence; 544905305; NZ_AUUR01000139.1
1413; Actinobaculum sp. oral taxon 183 str. F0552 Scaffold15, whole genome
shotgun sequence; 545327527; NZ_KE951412.1
1414; Actinobaculum sp. oral taxon 183 str. F0552 A_P1HMPREF0043-1.0_Cont1.1,
whole genome shotgun sequence; 541476958; AWSB01000006.1
1415; Propionibacterium acidifaciens F0233 ctg1127964738299, whole
genome shotgun sequence; 544249812; ACVN02000045.1
1416; Rubidibacter lacunae KORDI 51-2 KR51_contig00121, whole genome
shotgun sequence; 550281965; NZ_ASSJ01000070.1
1417; Rothia aeria F0184 R_aeriaHMPREF0742-1.0_Cont136.4, whole
genome shotgun sequence; 551695014; AXZG01000035.1
1418; Candidatus Halobonum tyrrellensis G22 contig00002, whole genome
shotgun sequence; 557371823; NZ_ASGZ01000002.1
1419; Blastomonas sp. CACIA14H2 contig00049, whole genome shotgun
sequence; 563282524; AYSC01000019.1
1420; Frankia sp. CcI6 CcI6DRAFT_scaffold_51.52, whole genome shotgun
sequence; 563312125; AYTZ01000052.1
1421; Frankia sp. CeD CEDDRAFT_scaffold_22.23, whole genome shotgun
sequence; 737947180; NZ_JPGU01000023.1
1422; Clostridium butyricum DORA_1 Q607_CBUC00058, whole genome
shotgun sequence; 566226100; AZLX01000058.1
1423; Streptococcus sp. DORA_10 Q617_SPSC00257, whole genome
shotgun sequence; 566231608; AZMH01000257.1
1424; Candidatus Entotheonella gemina TSY2_contig00559, whole genome
shotgun sequence; 575423213; AZHX01000559.1
1425; Streptomyces roseosporus NRRL 15998 supercont3.1 genomic scaffold,
whole genome shotgun sequence; 221717172; DS999644.1
1426; Frankia sp. CcI6 CcI6DRAFT_scaffold_51.52, whole genome shotgun
sequence; 563312125; AYTZ01000052.1
1427; Frankia sp. Thr ThrDRAFT_scaffold_28.29, whole genome shotgun
sequence; 602262270; JENI01000029.1
1428; Novosphingobium resinovorum strain KF1 contig000008, whole
genome shotgun sequence; 738615271; NZ_JFYZ01000008.1
1429; Brevundimonas abyssalis TAR-001 DNA, contig: BAB005, whole
genome shotgun sequence; 543418148; BATC01000005.1
1430; Bacillus akibai JCM 9157, whole genome shotgun sequence;
737696658; NZ_BAUV01000025.1
1431; Bacillus boroniphilus JCM 21738 DNA, contig: contig_6, whole
genome shotgun sequence; 571146044; BAUW01000006.1
1432; Gracilibacillus boraciitolerans JCM 21714 DNA, contig: contig_30,
whole genome shotgun sequence; 575082509; BAVS01000030.1
1433; Bacterium endosymbiont of Mortierella elongata FMR23-6, whole
genome shotgun sequence; 779889750; NZ_DF850521.1
1434; Sphingopyxis sp. C-1 DNA, contig: contig_1, whole genome shotgun
sequence; 834156795; BBRO01000001.1
1435; Sphingopyxis sp. C-1 DNA, contig: contig_1, whole genome shotgun
sequence; 834156795; BBRO01000001.1
1436; Ideonella sakaiensis strain 201-F6, whole genome shotgun sequence;
928998724; NZ_BBYR01000007.1
1437; Brevundimonas sp. EAKA contig5, whole genome shotgun sequence;
737322991; NZ_JMQR01000005.1
1438; Streptomyces griseorubens strain JSD-1 contig143, whole genome
shotgun sequence; 657284919; JJMG01000143.1
1439; Frankia sp. CeD CEDDRAFT_scaffold_22.23, whole genome shotgun
sequence; 737947180; NZ_JPGU01000023.1
1440; Frankia sp. CcI6 CcI6DRAFT_scaffold_51.52, whole genome shotgun
sequence; 563312125; AYTZ01000052.1
1441; Frankia sp. CeD CEDDRAFT_scaffold_22.23, whole genome shotgun
sequence; 737947180; NZ_JPGU01000023.1
1442; Bifidobacterium callitrichos DSM 23973 contig4, whole genome
shotgun sequence; 759443001; NZ_JDUV01000004.1
1443; Streptomyces sp. JS01 contig2, whole genome shotgun sequence;
695871554; NZ_JPWW01000002.1
1444; Sphingopyxis sp. LC81 contig43, whole genome shotgun sequence;
686469310; JNFD01000038.1
1445; Sphingopyxis sp. LC81 contig24, whole genome shotgun sequence;
739659070; NZ_JNFD01000017.1
1446; Sphingopyxis sp. LC363 contig36, whole genome shotgun sequence;
739702045; NZ_JNFC01000030.1
1447; Burkholderia pseudomallei strain BEF DP42.Contig323, whole genome
shotgun sequence; 686949962; JPNR01000131.1
1448; Xanthomonas cannabis pv. phaseoli strain Nyagatare scf_52938_7,
whole genome shotgun sequence; 835885587; NZ_KN265462.1
1449; Burkholderia pseudomallei MSHR435 Y033.Contig530, whole genome
shotgun sequence; 715120018; JRFP01000024.1
1450; Candidatus Thiomargarita nelsonii isolate Hydrate Ridge contig_1164,
whole genome shotgun sequence; 723288710; JSZA01001164.1
1451; Novosphingobium sp. P6W scaffold9, whole genome shotgun sequence;
763095630; NZ_JXZE01000009.1
1452; Streptomyces griseus strain S4-7 contig113, whole genome shotgun
sequence; 764464761; NZ_JYBE01000113.1
1453; Peptococcaceae bacterium BRH_c4b BRHa_1001357, whole genome
shotgun sequence; 780813318; LADO01000010.1
1454; Streptomyces rubellomurinus subsp. indigofems strain ATCC 31304 contig-55,
whole genome shotgun sequence; 783374270; NZ_JZKG01000056.1
1455; Streptomyces sp. NRRL S-444 contig322.4, whole genome shotgun
sequence; 797049078; JZWX01001028.1
1456; Candidate division TM6 bacterium GW2011_GWF2_36_131
US03_C0013, whole genome shotgun sequence; 818310996; LBRK01000013.1
1457; Sphingobium czechense LL01 25410_1, whole genome shotgun
sequence; 861972513; JACT01000001.1
1458; Streptomyces caatingaensis strain CMAA 1322 contig02, whole genome
shotgun sequence; 906344334; NZ_LFXA01000002.1
1459; Paenibacillus polymyxa strain YUPP-8 scaffold32, whole genome
shotgun sequence; 924434005; LIYK01000027.1
1460; Burkholderia mallei GB8 horse 4 contig_394, whole genome shotgun
sequence; 67639376; NZ_AAHO01000116.1
1461; Streptomyces rimosus subsp. rimosus ATCC 10970 contig00312, whole
genome shotgun sequence; 441176881; NZ_ANSJ01000243.1
1462; Streptomyces rimosus subsp. rimosus ATCC 10970 contig00333, whole
genome shotgun sequence; 441178796; NZ_ANSJ01000259.1
1463; Streptomyces rimosus subsp. rimosus ATCC 10970 contig00312, whole
genome shotgun sequence; 441176881; NZ_ANSJ01000243.1
1464; Streptomyces rimosus subsp. rimosus ATCC 10970 contig00333, whole
genome shotgun sequence; 441178796; NZ_ANSJ01000259.1
1465; Streptomyces rimosus subsp. rimosus ATCC 10970 contig00333, whole
genome shotgun sequence; 441178796; NZ_ANSJ01000259.1
1466; Streptomyces rimosus subsp. rimosus ATCC 10970 contig00333, whole
genome shotgun sequence; 441178796; NZ_ANSJ01000259.1
1467; Streptomyces rimosus subsp. rimosus strain NRRL WC-3924 contig82.1,
whole genome shotgun sequence; 663379797; NZ_JOBW01000082.1
1468; Streptomyces sp. NRRL F-5755 P309contig7.1, whole genome shotgun
sequence; 926371541; NZ_LGCW01000295.1
1469; Streptomyces sp. NRRL F-5755 P309contig48.1, whole genome
shotgun sequence; 926371517; NZ_LGCW01000271.1
1470; Streptomyces sp. NRRL F-6491 P443contig15.1, whole genome
shotgun sequence; 925610911; LGEE01000058.1
1471; Streptomyces sp. NRRL S-444 contig322.4, whole genome shotgun
sequence; 797049078; JZWX01001028.1
1472; Actinobacteria bacterium OK074 ctg60, whole genome shotgun
sequence; 930473294; NZ_LJCV01000275.1
1473; Betaproteobacteria bacterium SG8_39 WOR_8-12_2589, whole
genome shotgun sequence; 931421682; LJTQ01000030.1
1474; Candidate division BRC1 bacterium SM23_51 WORSMTZ_10094,
whole genome shotgun sequence; 931536013; LJUL01000022.1
1475; Bacillus vietnamensis strain UCD-SED5 scaffold_15, whole genome
shotgun sequence; 933903534; LIXZ01000017.1
1476; Xanthomonas arboricola strain CITA 44 CITA_44_contig_26, whole
genome shotgun sequence; 937505789; NZ_LJGM01000026.1
1477; Xanthomonas sp. Mitacek01 contig_17, whole genome shotgun
sequence; 941965142; NZ_LKIT01000002.1
1478; Erythrobacteraceae bacterium HL-111 ITZY_scaf_51, whole genome
shotgun sequence; 938259025; LJSW01000006.1
1479; Halomonas sp. HL-93 ITZY_scaf_415, whole genome shotgun
sequence; 938285459; LJST01000237.1
1480; Paenibacillus sp. Soil724D2 contig_11, whole genome shotgun
sequence; 946400391; LMRY01000003.1
1481; Streptomyces silvensis strain ATCC 53525 53525_Assembly_Contig_22,
whole genome shotgun sequence; 970361514; LOCL01000028.1
1482; Bacillus cereus R309803 chromosome, whole genome shotgun
sequence; 238801472; NZ_CM000720.1
1483; Streptococcus pneumoniae strain PT8082 isolate E3GXY, whole
genome shotgun sequence; 935445269; NZ_CIEC02000098.1
1484; Streptococcus pneumoniae strain 37, whole genome shotgun sequence;
912676034; NZ_CMPZ01000004.1
1485; Bacillus cereus Rock3-44 chromosome, whole genome shotgun
sequence; 238801485; NZ_CM000733.1
1486; Bacillus cereus VDM006 acrHb-supercont1.1, whole genome shotgun
sequence; 507060269; NZ_KB976864.1
1487; Bacillus cereus AH1271 chromosome, whole genome shotgun
sequence; 238801491; NZ_CM000739.1
1488; Bacillus cereus VD115 supercont1.1, whole genome shotgun sequence;
423614674; NZ_JH792165.1
1489; Bacillus thuringiensis MC28, complete genome; 407703236; NC_018693.1
1490; Bacillus thuringiensis serovar andalousiensis BGSC 4AW1 chromosome,
whole genome shotgun sequence; 238801506; NZ_CM000754.1
1491; Bacillus cereus BAG3X2-1 supercont1.1, whole genome shotgun
sequence; 423416528; NZ_JH791923.1
1492; Escherichia coli strain EC2_3 Contig93, whole genome shotgun
sequence; 742921760; NZ_JWKL01000093.1
1493; Bacillus cereus NVH0597-99 gcontig2_1106483384196, whole genome
shotgun sequence; 196038187; NZ_ABDK02000003.1
1494; Bacillus cereus VD142 actaa-supercont2.2, whole genome shotgun
sequence; 514340871; NZ_KE150045.1
1495; Bacillus cereus BAG5X2-1 supercont1.1, whole genome shotgun
sequence; 423456860; NZ_JH791975.1
1496; Bacillus cereus BAG6O-2 supercont1.1, whole genome shotgun
sequence; 423468694; NZ_JH804628.1
1497; Bacillus cereus HuA2-9 acqVt-supercont1.1, whole genome shotgun
sequence; 507020427; NZ_KB976152.1
1498; Bacillus cereus HuA3-9 acqVv-supercont1.4, whole genome shotgun
sequence; 507024338; NZ_KB976146.1
1499; Bacillus cereus MC67 supercont1.2, whole genome shotgun sequence;
423557538; NZ_JH792114.1
1500; Bacillus cereus AH621 chromosome, whole genome shotgun sequence;
238801471; NZ_CM000719.1
1501; Bacillus cereus VD107 supercont1.1, whole genome shotgun sequence;
423609285; NZ_JH792232.1
1502; Bacillus cereus VDM034 supercont1.1, whole genome shotgun
sequence; 423666303; NZ_JH791809.1
1503; Enterococcus faecalis D6 supercont1.4, whole genome shotgun
sequence; 242358782; NZ_GG688629.1
1504; Enterococcus faecalis EnGen0363 strain RMC5 acAqY-supercont1.4,
whole genome shotgun sequence; 502232520; NZ_KB944632.1
1505; Enterococcus faecalis TX1341 Scfld578, whole genome shotgun
sequence; 422736691; NZ_GL457197.1
1506; Rhodobacter sphaeroides WS8N chromosome chrI, whole genome
shotgun sequence; 332561612; NZ_CM001161.1
1507; Ruminococcus albus 8 contig00035, whole genome shotgun sequence;
325680876; NZ_ADKM02000123.1
1508; Brevundimonas diminuta ATCC 11568 BDIM_scaffold00005, whole
genome shotgun sequence; 329889017; NZ_GL883086.1
1509; Brevundimonas diminuta 470-4 Scfld7, whole genome shotgun
sequence; 444405902; NZ_KB291784.1
1510; Clostridium butyricum 5521 gcontig_1106103650482, whole genome
shotgun sequence; 182420360; NZ_ABDT01000120.2
1511; Clostridium butyricum strain HM-68 Contig83, whole genome shotgun
sequence; 760273878; NZ_JXBT01000001.1
1512; Xanthomonas citri pv. punicae str. LMG 859, whole genome shotgun
sequence; 390991205; NZ_CAGJ01000031.1
1513; Streptomyces clavuligerus ATCC 27064 supercont1.55, whole genome
shotgun sequence; 254392242; NZ_DS570678.1
1514; Streptomyces rimosus subsp. rimosus ATCC 10970 contig00312, whole
genome shotgun sequence; 441176881; NZ_ANSJ01000243.1
1515; Streptomyces rimosus subsp. rimosus ATCC 10970 contig00333, whole
genome shotgun sequence; 441178796; NZ_ANSJ01000259.1
1516; Streptomyces viridochromogenes DSM 40736 supercont1.1, whole
genome shotgun sequence; 224581107; NZ_GG657757.1
1517; Streptomyces viridochromogenes DSM 40736 supercont1.1, whole
genome shotgun sequence; 224581107; NZ_GG657757.1
1518; Streptomyces viridochromogenes Tue57 Seq127, whole genome
shotgun sequence; 443625867; NZ_AMLP01000127.1
1519; Methanobacterium formicicum DSM 3637 Contig04, whole genome
shotgun sequence; 408381849; NZ_AMPO01000004.1
1520; Burkholderia mallei GB8 horse 4 contig_394, whole genome shotgun
sequence; 67639376; NZ_AAHO01000116.1
1521; Sphingobium yanoikuyae ATCC 51230 supercont1.1, whole genome
shotgun sequence; 427407324; NZ_JH992904.1
1522; Sphingobium yanoikuyae strain SHJ scaffold2, whole genome shotgun
sequence; 893711333; NZ_KQ235984.1
1523; Burkholderia mallei GB8 horse 4 contig_394, whole genome shotgun
sequence; 67639376; NZ_AAHO01000116.1
1524; Burkholderia pseudomallei 1710b chromosome I, complete sequence;
76808520; NC_007434.1
1525; Burkholderia pseudomallei 1258a Contig0089, whole genome shotgun
sequence; 418540998; NZ_AHJB01000089.1
1526; Burkholderia pseudomallei strain BEF DP42.Contig323, whole genome
shotgun sequence; 686949962; JPNR01000131.1
1527; [Eubacterium] cellulosolvens 6 chromosome, whole genome shotgun
sequence; 389575461; NZ_CM001487.1
1528; Streptomyces mobaraensis NBRC 13819 = DSM 40847 contig024,
whole genome shotgun sequence; 458977979; NZ_AORZ01000024.1
1529; Streptomyces mobaraensis NBRC 13819 = DSM 40847 contig079,
whole genome shotgun sequence; 458984960; NZ_AORZ01000079.1
1530; Amycolatopsis azurea DSM 43854 contig60, whole genome shotgun
sequence; 451338568; NZ_ANMG01000060.1
1531; Streptomyces pristinaespiralis ATCC 25486 chromosome, whole
genome shotgun sequence; 297189896; NZ_CM000950.1
1532; Xanthomonas axonopodis pv. malvacearum str. GSPB1386 1386_Scaffold6,
whole genome shotgun sequence; 418516056; NZ_AHIB01000006.1
1533; Burkholderia thailandensis MSMB43 Scaffold3, whole genome shotgun
sequence; 424903876; NZ_JH692063.1
1534; Xanthomonas gardneri ATCC 19865 XANTHO7DRAF_Contig52,
whole genome shotgun sequence; 325923334; NZ_AEQX01000392.1
1535; Leptolyngbya sp. PCC 7375 Lepto7375DRAFT_LPA.5, whole genome
shotgun sequence; 427415532; NZ_JH993797.1
1536; Streptomyces auratus AGR0001 Scaffold1, whole genome shotgun
sequence; 398790069; NZ_JH725387.1
1537; Halosimplex carlsbadense 2-9-1 contig_4, whole genome shotgun
sequence; 448406329; NZ_AOIU01000004.1
1538; Rothia aeria F0474 contig00003, whole genome shotgun sequence;
383809261; NZ_AJJQ01000036.1
1539; Sphingobium japonicum BiD32, whole genome shotgun sequence;
494022722; NZ_CAVK010000217.1
1540; Amycolatopsis decaplanina DSM 44594 Contig0055, whole genome
shotgun sequence; 458848256; NZ_AOHO01000055.1
1541; Fictibacillus macauensis ZFHKF-1 Contig20, whole genome shotgun
sequence; 392955666; NZ_AKKV01000020.1
1542; Paenibacillus sp. Aloe-11 GW8_15, whole genome shotgun sequence;
375307420; NZ_JH601049.1
1543; Rhodanobacter denitrificans strain 116-2 contig032, whole genome
shotgun sequence; 389798210; NZ_AJXV01000032.1
1544; Caulobacter sp. AP07 PMI01_contig_53.53, whole genome shotgun
sequence; 399069941; NZ_AKKF01000033.1
1545; Novosphingobium sp. AP12 PMI02_contig_78.78, whole genome
shotgun sequence; 399058618; NZ_AKKE01000021.1
1546; Sphingobium sp. AP49 PMI04_contig490.490, whole genome shotgun
sequence; 398386476; NZ_AJVL01000086.1
1547; Moorea producens 3L scf52054, whole genome shotgun sequence;
332710503; NZ_GL890955.1
1548; Rhodanobacter sp. 115 contig437, whole genome shotgun sequence;
389759651; NZ_AJXS01000437.1
1549; Pedobacter sp. BAL39 1103467000500, whole genome shotgun
sequence; 149277003; NZ_ABCM01000004.1
1550; Pedobacter sp. BAL39 1103467000492, whole genome shotgun
sequence; 149277373; NZ_ABCM01000005.1
1551; Sulfurovum sp. AR contig00449, whole genome shotgun sequence;
386284588; NZ_AJLE01000006.1
1552; Mucilaginibacter paludis DSM 18603 chromosome, whole genome
shotgun sequence; 373951708; NZ_CM001403.1
1553; Magnetospirillum caucaseum strain SO-1 contig00006, whole genome
shotgun sequence; 458904467; NZ_AONQ01000006.1
1554; Streptomyces sp. Mg1 supercont1.100, whole genome shotgun
sequence; 254387191; NZ_DS570483.1
1555; Sphingomonas sp. LH128 Contig3, whole genome shotgun sequence;
402821166; NZ_ALVC01000003.1
1556; Sphingomonas sp. LH128 Contig8, whole genome shotgun sequence;
402821307; NZ_ALVC01000008.1
1557; Streptomyces sp. AA4 supercont1.3, whole genome shotgun sequence;
224581098; NZ_GG657748.1
1558; Cecembia lonarensis LW9 contig000133, whole genome shotgun
sequence; 406663945; NZ_AMGM01000133.1
1559; Actinomyces sp. oral taxon 848 str. F0332 Scfld0, whole genome
shotgun sequence; 260447107; NZ_GG703879.1
1560; Streptomyces ipomoeae 91-03 gcontig_1108499715961, whole genome
shotgun sequence; 429196334; NZ_AEJC01000180.1
1561; Frankia sp. QA3 chromosome, whole genome shotgun sequence;
392941286; NZ_CM001489.1
1562; Fischerella thermalis PCC 7521 contig00099, whole genome shotgun
sequence; 484076371; NZ_AJLL01000098.1
1563; Rhodobacter sp. AKP1 contig19, whole genome shotgun sequence;
429208285; NZ_ANFS01000019.1
1564; Rubrivivax benzoatilyticus JA2 = ATCC BAA-35 strain JA2 contig_155,
whole genome shotgun sequence; 332527785; NZ_AEWG01000155.1
1565; Burkholderia thailandensis E555 BTHE555_314, whole genome
shotgun sequence; 485035557; NZ_AECN01000315.1
1566; Burkholderia thailandensis E555 BTHE555_314, whole genome
shotgun sequence; 485035557; NZ_AECN01000315.1
1567; Streptomyces chartreusis NRRL 12338 12338_Doro1_scaffold19,
whole genome shotgun sequence; 381200190; NZ_JH164855.1
1568; Streptomyces globisporus C-1027 Scaffold24_1, whole genome shotgun
sequence; 410651191 ; NZ_AJUO01000171.1
1569; Streptomyces roseosporus NRRL 15998 supercont3.1 genomic scaffold,
whole genome shotgun sequence; 221717172; DS999644.1
1570; Burkholderia oklahomensis EO147 PMP6xxBPSxxE0147-248, whole
genome shotgun sequence; 149146238; NZ_ABBF01000248.1
1571; Burkholderia oklahomensis C6786 PMP6xxBOKxxC6786-168, whole
genome shotgun sequence; 149147045; NZ_ABBG01000168.1
1572; Candidatus Odyssella thessalonicensis L13 HMO_scaffold00016, whole
genome shotgun sequence; 343957487; NZ_AEWF01000005.1
1573; Candidatus Odyssella thessalonicensis L13 HMO_scaffold00016, whole
genome shotgun sequence; 343957487; NZ_AEWF01000005.1
1574; Sphingobium yanoikuyae XLDN2-5 contig000022, whole genome
shotgun sequence; 378759068; NZ_AFXE01000022.1
1575; Sphingobium yanoikuyae XLDN2-5 contig000029, whole genome
shotgun sequence; 378759075; NZ_AFXE01000029.1
1576; Paenibacillus peoriae KCTC 3763 contig9, whole genome shotgun
sequence; 389822526; NZ_AGFX01000048.1
1577; Citromicrobium sp. JLT1363 contig00009, whole genome shotgun
sequence; 341575924; NZ_AEUE01000009.1
1578; Acaryochloris sp. CCMEE 5410 contig00232, whole genome shotgun
sequence; 359367134; NZ_AFEJ01000154.1
1579; Stenotrophomonas maltophilia strain 419_SMAL
707_128228_1961615_4_{——}642_{——}523_, whole genome shotgun sequence;
896535166; NZ_JVHW01000017.1
1580; Streptomyces sp. S4, whole genome shotgun sequence; 358468601;
NZ_FR873700.1
1581; Pandoraea sp. SD6-2 scaffold29, whole genome shotgun sequence;
505733815; NZ_KB944444.1
1582; Mesorhizobium loti MAFF303099 DNA, complete genome; 57165207;
NC_002678.2
1583; Streptomyces avermitilis MA-4680 = NBRC 14893, complete genome;
162960844; NC_003155.4
1584; Thermobifida fusca TM51 contig028, whole genome shotgun sequence;
510814910; NZ_AOSG01000028.1
1585; Rhodobacter sphaeroides 2.4.1 chromosome 1, whole genome shotgun
sequence; 482849861; NZ_AKBU01000001.1
1586; Rhodospirillum rubrum F11, complete genome; 386348020; NC_017584.1
1587; Rhodospirillum rubrum F11, complete genome; 386348020; NC_017584.1
1588; Frankia sp. CcI6 CcI6DRAFT_scaffold_51.52, whole genome shotgun
sequence; 563312125; AYTZ01000052.1
1589; Roseobacter denitrificans OCh 114, complete genome; 110677421;
NC_008209.1
1590; Rhodobacter sphaeroides ATCC 17029 chromosome 1, complete
sequence; 126460778; NC_009049.1
1591; Rhodobacter sphaeroides ATCC 17025, complete genome; 146276058;
NC_009428.1
1592; Streptococcus suis SC84 complete genome, strain SC84; 253750923;
NC_012924.1
1593; Geobacter uraniireducens Rf4, complete genome; 148262085; NC_009483.1
1594; Sulfurovum sp. NBC37-1 genomic DNA, complete genome;
152991597; NC_009663.1
1595; Acaryochloris marina MBIC11017, complete genome; 158333233;
NC_009925.1
1596; Bacillus weihenstephanensis KBAB4, complete genome; 163938013;
NC_010184.1
1597; Caulobacter sp. K31 plasmid pCAUL01, complete sequence;
167621728; NC_010335.1
1598; Caulobacter sp. K31, complete genome; 167643973; NC_010338.1
1599; Candidatus Amoebophilus asiaticus 5a2, complete genome; 189501470;
NC_010830.1
1600; Stenotrophomonas maltophilia R551-3, complete genome; 194363778;
NC_011071.1
1601; Cyanothece sp. PCC 7425, complete genome; 220905643; NC_011884.1
1602; Chitinophaga pinensis DSM 2588, complete genome; 256419057;
NC_013132.1
1603; Haliangium ochraceum DSM 14365, complete genome; 262193326;
NC_013440.1
1604; Thermobaculum terrenum ATCC BAA-798 chromosome 2, complete
sequence; 269838913; NC_013526.1
1605; Xylanimonas cellulosilytica DSM 15894, complete genome;
269954810; NC_013530.1
1606; Stackebrandtia nassauensis DSM 44728, complete genome; 291297538;
NC_013947.1
1607; Sphingobium japonicum UT26S DNA, chromosome 1, complete
genome; 294009986; NC_014006.1
1608; Sphingobium japonicum UT26S plasmid pCHQ1 DNA, complete
genome; 294023656; NC_014007.1
1609; Butyrivibrio proteoclasticus B316 chromosome 1, complete sequence;
302669374; NC_014387.1
1610; Paenibacillus jamilae strain NS115 contig_27, whole genome shotgun
sequence; 970428876; NZ_LDRX01000027.1
1611; Frankia inefficax, complete genome; 312193897; NC_014666.1
1612; Asticcacaulis excentricus CB 48 chromosome 1, complete sequence;
315497051; NC_014816.1
1613; Terriglobus saanensis SP1PR4, complete genome; 320105246;
NC_014963.1
1614; Methanobacterium lacus strain AL-21, complete genome; 325957759;
NC_015216.1
1615; Marinomonas mediterranea MMB-1, complete genome; 326793322;
NC_015276.1
1616; Desulfobacca acetoxidans DSM 11109, complete genome; 328951746;
NC_015388.1
1617; Methanobacterium paludis strain SWAN1, complete genome;
333986242; NC_015574.1
1618; Frankia symbiont of Datisca glomerata, complete genome; 336176139;
NC_015656.1
1619; Halopiger xanaduensis SH-6 plasmid pHALXA01, complete genome;
336251750; NC_015658.1
1620; Mesorhizobium opportunistum WSM2075, complete genome;
337264537; NC_015675.1
1621; Runella slithyformis DSM 19594, complete genome; 338209545;
NC_015703.1
1622; Roseobacter litoralis Och 149, complete genome; 339501577;
NC_015730.1
1623; Streptomyces violaceusniger Tu 4113 plasmid pSTRVI01, complete
sequence; 345007457; NC_015951.1
1624; Streptomyces violaceusniger Tu 4113, complete genome; 345007964;
NC_015957.1
1625; Sphingobium sp. SYK-6 DNA, complete genome; 347526385;
NC_015976.1
1626; Chloracidobacterium thermophilum B chromosome 1, complete
sequence; 347753732; NC_016024.1
1627; Kitasatospora setae KM-6054 DNA, complete genome; 357386972;
NC_016109.1
1628; Streptomyces cattleya str. NRRL 8057 main chromosome, complete
genome; 357397620; NC_016111.1
1629; Legionella pneumophila subsp. pneumophila ATCC 43290, complete
genome; 378775961; NC_016811.1
1630; Rubrivivax gelatinosus IL144 DNA, complete genome; 383755859;
NC_017075.1
1631; Francisella cf. novicida 3523, complete genome; 387823583;
NC_017449.1
1632; Rhodospirillum rubrum F11, complete genome; 386348020;
NC_017584.1
1633; Actinoplanes sp. SE50/110, complete genome; 386845069;
NC_017803.1
1634; Legionella pneumophila subsp. pneumophila str. Lorraine chromosome,
complete genome; 397662556; NC_018139.1
1635; Emticicia oligotrophica DSM 17448, complete genome; 408671769;
NC_018748.1
1636; Streptomyces venezuelae ATCC 10712 complete genome; 408675720;
NC_018750.1
1637; Nostoc sp. PCC 7107, complete genome; 427705465; NC_019676.1
1638; Nostoc sp. PCC 7524, complete genome; 427727289; NC_019684.1
1639; Crinalium epipsammum PCC 9333, complete genome; 428303693;
NC_019753.1
1640; Thennobacillus composti KWC4, complete genome; 430748349;
NC_019897.1
1641; Mesorhizobium australicum WSM2073, complete genome; 433771415;
NC_019973.1
1642; Desulfocapsa sulfexigens DSM 10523, complete genome; 451945650;
NC_020304.1
1643; Rhodanobacter denitrificans strain 2APBS1, complete genome;
469816339; NC_020541.1
1644; Burkholderia thailandensis MSMB121 chromosome 1, complete
sequence; 488601775; NC_021173.1
1645; Streptomyces fulvissimus DSM 40593, complete genome; 488607535;
NC_021177.1
1646; Streptomyces davawensis strain JCM 4913 complete genome;
471319476; NC_020504.1
1647; Streptomyces davawensis strain JCM 4913 complete genome;
471319476; NC_020504.1
1648; Desulfotomaculum acetoxidans DSM 771, complete genome;
258513366; NC_013216.1
1649; Desulfotomaculum acetoxidans DSM 771, complete genome;
258513366; NC_013216.1
1650; Actinosynnema mirum DSM 43827, complete genome; 256374160;
NC_013093.1
1651; Bacillus cereus BAG2O-3 acfXF-supercont1.1, whole genome shotgun
sequence; 507017505; NZ_KB976530.1
1652; Bacillus cereus VD118 acrHo-supercont1.9, whole genome shotgun
sequence; 507035131; NZ_KB976800.1
1653; Bacillus cereus VDM053 acrGS-supcrcont1.7, whole genome shotgun
sequence; 507060152; NZ_KB976714.1
1654; Halomonas anticariensis FP35 = DSM 16096 strain FP35 Scaffold1,
whole genome shotgun sequence; 514429123; NZ_KE332377.1
1655; Halomonas anticariensis FP35 = DSM 16096 strain FP35 Scaffold1,
whole genome shotgun sequence; 514429123; NZ_KE332377.1
1656; Streptomyces sp. NRRL F-5639 contig75.1, whole genome shotgun
sequence; 664515060; NZ_JOGK01000075.1
1657; Acinetobacter gyllenbeigii MTCC 11365 contig1, whole genome
shotgun sequence; 514348304; NZ_ASQH01000001.1
1658; Streptomyces aurantiacus JA 4570 Seq17, whole genome shotgun
sequence; 514916021; NZ_AOPZ01000017.1
1659; Streptomyces aurantiacus JA 4570 Seq28, whole genome shotgun
sequence; 514916412; NZ_AOPZ01000028.1
1660; Streptomyces aurantiacus JA 4570 Seq63, whole genome shotgun
sequence; 514917321; NZ_AOPZ01000063.1
1661; Streptomyces aurantiacus JA 4570 Seq109, whole genome shotgun
sequence; 514918665; NZ_AOPZ01000109.1
1662; Paenibacillus polymyxa OSY-DF Contig136, whole genome shotgun
sequence; 484036841; NZ_AIPP01000136.1
1663; Fischerella muscicola SAG 1427-1 = PCC 73103 contig00215, whole
genome shotgun sequence; 484073367; NZ_AJLJ01000207.1
1664; Fischerella muscicola PCC 7414 contig00153, whole genome shotgun
sequence; 484075372; NZ_AJLK01000153.1
1665; Xanthomonas arboricola pv. corylina str. NCCB 100457 Contig50,
whole genome shotgun sequence; 507418017; NZ_APMC02000050.1
1666; Sphingobium xenophagum QYY contig015, whole genome shotgun
sequence; 484272664; NZ_AKIB01000015.1
1667; Pedobacter arcticus A12 Scaffold2, whole genome shotgun sequence;
484345004; NZ_JH947126.1
1668; Leptolyngbya boryana PCC 6306 LepboDRAFT_LPC.1, whole
genome shotgun sequence; 482909028; NZ_KB731324.1
1669; Fischerella sp. PCC 9339 PCC9339DRAFT_scaffold1.1, whole genome
shotgun sequence; 482909394; NZ_JH992898.1
1670; Mastigocladopsis repens PCC 10914 Mas10914DRAFT_scaffold1.1,
whole genome shotgun sequence; 482909462; NZ_JH992901.1
1671; Lactococcus garvieae Tac2 Tac2Contig_33, whole genome shotgun
sequence; 483258918; NZ_AMFE01000033.1
1672; Paenisporosarcina sp. TG-14 111.TG14.1_1, whole genome shotgun
sequence; 483299154; NZ_AMGD01000001.1
1673; Amphibacillus jilinensis Y1 Scaffold2, whole genome shotgun
sequence; 483992405; NZ_JH976435.1
1674; Alpha proteobacterium LLX12A LLX12A_contig00014, whole genome
shotgun sequence; 483996931; NZ_AMYX01000014.1
1675; Alpha proteobacterium LLX12A LLX12A_contig00026, whole genome
shotgun sequence; 483996974; NZ_AMYX01000026.1
1676; Alpha proteobacterium LLX12A LLX12A_contig00084, whole genome
shotgun sequence; 483997176; NZ_AMYX01000084.1
1677; Alpha proteobacterium L41A L41A_contig00002, whole genome
shotgun sequence; 483997957; NZ_AMYY01000002.1
1678; Nocardiopsis alba DSM 43377 contig_34, whole genome shotgun
sequence; 484007204; NZ_ANAC01000034.1
1679; Nocardiopsis halophila DSM 44494 contig_138, whole genome shotgun
sequence; 484007841; NZ_ANAD01000138.1
1680; Nocardiopsis halophila DSM 44494 contig_197, whole genome shotgun
sequence; 484008051; NZ_ANAD01000197.1
1681; Nocardiopsis halotolerans DSM 44410 contig_372, whole genome
shotgun sequence; 484016556; NZ_ANAX01000372.1
1682; Nocardiopsis lucentensis DSM 44048 contig_935, whole genome
shotgun sequence; 484021665; NZ_ANBC01000935.1
1683; Nocardiopsis alkaliphila YIM 80379 contig_111, whole genome
shotgun sequence; 484022237; NZ_ANBD01000111.1
1684; Nocardiopsis chromatogenes YIM 90109 contig_93, whole genome
shotgun sequence; 484026206; NZ_ANBH01000093.1
1685; Porphyrobacter sp. AAP82 Contig35, whole genome shotgun sequence;
484033307; NZ_ANFX01000035.1
1686; Blastomonas sp. AAP53 Contig8, whole genome shotgun sequence;
484033611; NZ_ANFZ01000008.1
1687; Blastomonas sp. AAP53 Contig14, whole genome shotgun sequence;
484033631; NZ_ANFZ01000014.1
1688; Paenibacillus sp. PAMC 26794 5104_29, whole genome shotgun
sequence; 484070054; NZ_ANHX01000029.1
1689; Oscillatoria sp. PCC 10802 Osc10802DRAFT_Contig7.7, whole
genome shotgun sequence; 484104632; NZ_KB235948.1
1690; Clostridium botulinum CB11/1-1 CB_contig00105, whole genome
shotgun sequence; 484141779; NZ_AORM01000006.1
1691; Actinopolyspora halophila DSM43834 ActhaDRAFT_contig1.1_C,
whole genome shotgun sequence; 484203522; NZ_AQUI01000002.1
1692; Asticcacaulis benevestitus DSM 16100 = ATCC BAA-896 strain DSM
16100 B060DRAFT_scaffold_12.13_C, whole genome shotgun sequence;
484226753; NZ_AQWM01000013.1
1693; Asticcacaulis benevestitus DSM 16100 = ATCC BAA-896 strain DSM
16100 B060DRAFT_scaffold_31.32_C, whole genome shotgun sequence;
484226810; NZ_AQWM01000032.1
1694; Streptomyces sp. FxanaC1 B074DRAFT_scaffold_1.2_C, whole
genome shotgun sequence; 484227180; NZ_AQWO01000002.1
1695; Streptomyces sp. FxanaC1 B074DRAFT_scaffold_7.8_C, whole
genome shotgun sequence; 484227195; NZ_AQWO01000008.1
1696; Smaragdicoccus niigatensis DSM 44881 = NBRC 103563 strain DSM
44881 F600DRAFT_scaffold00011.11_C, whole genome shotgun sequence;
484234624; NZ_AQXZ01000009.1
1697; Verrucomicrobium sp. 3C A37ADRAFT_scaffold1.1, whole genome
shotgun sequence; 483219562; NZ_KB901875.1
1698; Verrucomicrobium sp. 3C A37ADRAFT_scaffold1.1, whole genome
shotgun sequence; 483219562; NZ_KB901875.1
1699; Bradyrhizobium sp. WSM2793 A3ASDRAFT_scaffold_24.25, whole
genome shotgun sequence; 483314733; NZ_KB902785.1
1700; Streptomyces vitaminophilus DSM 41686 A3IGDRAFT_scaffold_10.11,
whole genome shotgun sequence; 483682977; NZ_KB904636.1
1701; Streptomyces sp. CcalMP-8W B053DRAFT_scaffold_17.18, whole
genome shotgun sequence; 483961830; NZ_KB890924.1
1702; Streptomyces sp. ScaeMP-e10 B061DRAFT_scaffold_0.1, whole
genome shotgun sequence; 483967534; NZ_KB891296.1
1703; Streptomyces sp. KhCrAH-244 B069DRAFT_scaffold_11.12, whole
genome shotgun sequence; 483969755; NZ_KB891596.1
1704; Streptomyces sp. HmicA12 B072DRAFT_scaffold_19.20, whole
genome shotgun sequence; 483972948; NZ_KB891808.1
1705; Streptomyces sp. MspMP-M5 B073DRAFT_scaffold_27.28, whole
genome shotgun sequence; 483974021; NZ_KB891893.1
1706; Bacillus mycoides strain Flugge 10206 DJ94.contig-100_16, whole
genome shotgun sequence; 727343482; NZ_JMQD01000030.1
1707; Streptomyces sp. CNY228 D330DRAFT_scaffold00011.11, whole
genome shotgun sequence; 484057944; NZ_KB898231.1
1708; Streptomyces sp. CNB091 D581DRAFT_scaffold00010.10, whole
genome shotgun sequence; 484070161; NZ_KB898999.1
1709; Sphingobium xenophagum NBRC 107872, whole genome shotgun
sequence; 483527356; NZ_BARE01000016.1
1710; Sphingobium xenophagum NBRC 107872, whole genome shotgun
sequence; 483532492; NZ_BARE01000100.1
1711; Bacillus oceanisediminis 2691 contig2644, whole genome shotgun
sequence; 485048843; NZ_ALEG01000067.1
1712; Bacillus sp. REN51N contig_2, whole genome shotgun sequence;
748816024; NZ_JXAB01000002.1
1713; Calothrix sp. PCC 7103 Cal7103DRAFT_CPM.6, whole genome
shotgun sequence; 485067373; NZ_KB217478.1
1714; Pseudanabaena sp. PCC 6802 Pse6802_scaffold_5, whole genome
shotgun sequence; 485067426; NZ_KB235914.1
1715; Actinopolyspora mortivallis DSM 44261 strain HS-1
ActmoDRAFT_scaffold1.1, whole genome shotgun sequence; 486324513;
NZ_KB913024.1
1716; Mesorhizobium huakuii 7653Rgenome; 657121522; CP006581.1
1717; Paenibacillus sp. HW567 B212DRAFT_scaffold1.1, whole genome
shotgun sequence; 486346141; NZ_KB910518.1
1718; Bacillus sp. 123MFChir2 H280DRAFT_scaffold00030.30, whole
genome shotgun sequence; 487368297; NZ_KB910953.1
1719; Streptomyces canus 299MFChir4.1 H293DRAFT_scaffold00032.32,
whole genome shotgun sequence; 487385965; NZ_KB911613.1
1720; Kribbella catacumbae DSM 19601 A3ESDRAFT_scaffold_7.8_C,
whole genome shotgun sequence; 484207511; NZ_AQUZ01000008.1
1721; Paenibacillus riograndensis SBR5 Contig78, whole genome shotgun
sequence; 485470216; NZ_A
1722; Nonomuraea coxensis DSM 45129 A3G7DRAFT_scaffold_4.5, whole
genome shotgun sequence; 483454700; NZ_KB903974.1
1723; Spirosoma spitsbergense DSM 19989 B157DRAFT_scaffold_76.77,
whole genome shotgun sequence; 483994857; NZ_KB893599.1
1724; Amycolatopsis alba DSM 44262 scaffold1, whole genome shotgun
sequence; 486330103; NZ_KB913032.1
1725; Amycolatopsis nigrescens CSC17Ta-90 AmyniDRAFT_Contig68.1_C,
whole genome shotgun sequence; 487404592; NZ_ARVW01000001.1
1726; Reyranella massiliensis 521, whole genome shotgun sequence;
484038067; NZ_HE997181.1
1727; Acidobacteriaceae bacterium KBS 83 G002DRAFT_scaffold00007.7,
whole genome shotgun sequence; 485076323; NZ_KB906739.1
1728; Novosphingobium lindaniclasticum LE124 contig147, whole genome
shotgun sequence; 544819688; NZ_ATHL01000147.1
1729; Actinobaculum sp. oral taxon 183 str. F0552 A_P1HMPREF0043-1.0_Cont1.1,
whole genome shotgun sequence; 541476958; AWSB01000006.1
1730; Sphingomonas-like bacterium B12, whole genome shotgun sequence;
484113405; NZ_BACX01000237.1
1731; Sphingomonas-like bacterium B12, whole genome shotgun sequence;
484113491; NZ_BACX01000258.1
1732; Thermoactinomyces vulgaris strain NRRL F-5595 F5595contig15.1,
whole genome shotgun sequence; 929862756; NZ_LGKI01000090.1
1733; Clostridium saccharobutylicum DSM 13864, complete genome;
550916528; NC_022571.1
1734; Butyrivibrio fibrisolvens AB2020 G616DRAFT_scaffold00015.15_C,
whole genome shotgun sequence; 551012921; NZ_ATVZ01000015.1
1735; Butyrivibrio sp. XPD2006 G590DRAFT_scaffold00008.8_C, whole
genome shotgun sequence; 551021553; NZ_ATVT01000008.1
1736; Butyrivibrio sp. AE3009 G588DRAFT_scaffold00030.30_C, whole
genome shotgun sequence; 551035505; NZ_ATVS01000030.1
1737; Acidobacteriaceae bacterium TAA166 strain TAA 166
H979DRAFT_scaffold_0.1_C, whole genome shotgun sequence; 551216990;
NZ_ATWD01000001.1
1738; Rothia aeria F0184 R_aeriaHMPREF0742-1.0_Cont136.4, whole
genome shotgun sequence; 551695014; AXZG01000035.1
1739; Klebsiella pneumoniae 4541-2 4541_2_67, whole genome shotgun
sequence; 657698352; NZ_JDWO01000067.1
1740; Klebsiella pneumoniae MGH 19 addTc-supercont1.2, whole genome
shotgun sequence; 556494858; NZ_KI535678.1
1741; Candidatus Halobonum tyrrellensis G22 contig00002, whole genome
shotgun sequence; 557371823; NZ_ASGZ01000002.1
1742; Asticcacaulis sp. AC466 contig00008, whole genome shotgun sequence;
557833377; NZ_AWGE01000008.1
1743; Asticcacaulis sp. AC466 contig00033, whole genome shotgun sequence;
557835508; NZ_AWGE01000033.1
1744; Asticcacaulis sp. YBE204 contig00005, whole genome shotgun
sequence; 557839256; NZ_AWGF01000005.1
1745; Asticcacaulis sp. YBE204 contig00010, whole genome shotgun
sequence; 557839714; NZ_AWGF01000010.1
1746; Streptomyces roseochromogenus subsp. oscitans DS 12.976 chromosome,
whole genome shotgun sequence; 566155502; NZ_CM002285.1
1747; Bacillus boroniphilus JCM 21738 DNA, contig: contig_6, whole
genome shotgun sequence; 571146044; BAUW01000006.1
1748; Mesorhizobium sp. LNHC232B00 scaffold0020, whole genome
shotgun sequence; 563561985; NZ_AYWP01000020.1
1749; Mesorhizobium sp. LNHC220B00 scaffold0002, whole genome
shotgun sequence; 563576979; NZ_AYWS01000002.1
1750; Mesorhizobium sp. LNHC221B00 scaffold0001, whole genome
shotgun sequence; 563570867; NZ_AYWR01000001.1
1751; Clostridium pasteurianum NRRL B-598, complete genome; 930593557;
NZ_CP011966.1
1752; Paenibacillus peoriae strain HS311, complete genome; 922052336;
NZ_CPO11512.1
1753; Magnetospirillum gryphiswaldense MSR-1 v2, complete genome;
568144401; NC_023065.1
1754; Streptococcus suis strain LS8F, whole genome shotgun sequence;
766589647; NZ_CEHJ01000007.1
1755; Bradyrhizobium sp. ARR65 BraARR65DRAFT_scaffold_9.10_C,
whole genome shotgun sequence; 639168743; NZ_AWZU01000010.1
1756; Paenibacillus sp. MAEPY2 contig7, whole genome shotgun sequence;
639451286; NZ_AWUK01000007.1
1757; Verrucomicrobia bacterium LP2A
G346DRAFT_scf7180000000012_quiver.2_C, whole genome shotgun
sequence; 640169055; NZ_JAFS01000002.1
1758; Verrucomicrobia bacterium LP2A
G346DRAFT_scf7180000000012_quiver.2_C, whole genome shotgun
sequence; 640169055; NZ_JAFS01000002.1
1759; Robbsia andropogonis Ba3549 160, whole genome shotgun sequence;
640451877; NZ_AYSW01000160.1
1760; Xanthomonas arboricola 3004 contig00003, whole genome shotgun
sequence; 640500871; NZ_AZQY01000003.1
1761; Bacillus mannanilyticus JCM 10596, whole genome shotgun sequence;
640600411; NZ_BAMO01000071.1
1762; Bacillus sp. H1a Contig1, whole genome shotgun sequence; 640724079;
NZ_AYMH01000001.1
1763; Enterococcus faecalis ATCC 4200 supercont1.2, whole genome shotgun
sequence; 239948580; NZ_GG670372.1
1764; Haloglycomyces albus DSM 45210 HalalDRAFT_chromosome1.1_C,
whole genome shotgun sequence; 644043488; NZ_AZUQ01000001.1
1765; Sphingomonas sanxanigenens NX02, complete genome; 749321911;
NZ_CP006644.1
1766; Kutzneria albida strain NRRL B-24060 contig305.1, whole genome
shotgun sequence; 662161093; NZ_JNYH01000515.1
1767; Kutzneria albida DSM 43870, complete genome; 754862786;
NZ_CP007155.1
1768; Paenibacillus sp. ICGEB2008 Contig_7, whole genome shotgun
sequence; 483624383; NZ_AMQU01000007.1
1769; Sphingobium barthaii strain KK22, whole genome shotgun sequence;
646529442; NZ_BATN01000092.1
1770; Paenibacillus polymyxa 1-43 S143_contig00221, whole genome
shotgun sequence; 647225094; NZ_ASRZ01000173.1
1771; Paenibacillus graminis RSA19 S2_contig00597, whole genome shotgun
sequence; 647256651; NZ_ASSG01000304.1
1772; Paenibacillus polymyxa TD94 STD94_contig00759, whole genome
shotgun sequence; 647274605; NZ_ASSA01000134.1
1773; Bacillus flexus T6186-2 contig_106, whole genome shotgun sequence;
647636934; NZ_JANV01000106.1
1774; Brevundimonas naejangsanensis strain B1 contig000018, whole genome
shotgun sequence; 647728918; NZ_JHOF01000018.1
1775; Sphingomonas-like bacterium B12, whole genome shotgun sequence;
484115568; NZ_BACX01000797.1
1776; Nocardiopsis potens DSM 45234 contig_25, whole genome shotgun
sequence; 484017897; NZ_ANBB01000025.1
1777; Nocardiopsis halotolerans DSM 44410 contig_26, whole genome
shotgun sequence; 484015294; NZ_ANAX01000026.1
1778; Nocardiopsis baichengensis YIM 90130 Scaffold15_1, whole genome
shotgun sequence; 484012558; NZ_ANAS01000033.1
1779; Nocardiopsis alba DSM 43377 contig_10, whole genome shotgun
sequence; 484007121; NZ_ANAC01000010.1
1780; Sphingomonas melonis DAPP-PG 224 Sphme3DRAFT_scaffold1.1,
whole genome shotgun sequence; 482984722; NZ_KB900605.1
1781; Acidobacteriaceae bacterium TAA166 strain TAA 166
H979DRAFT_scaffold_0.1_C, whole genome shotgun sequence; 551216990;
NZ_ATWD01000001.1
1782; Actinomadura oligospora ATCC 43269 P696DRAFT_scaffold00008.8_C,
whole genome shotgun sequence; 651281457; NZ_JADG01000010.1
1783; Butyrivibrio sp. XPD2002 G587DRAFT_scaffold00011.11, whole
genome shotgun sequence; 651381584; NZ_KE384117.1
1784; Bacillus sp. UNC437CL72CviS29 M014DRAFT_scaffold00009.9_C,
whole genome shotgun sequence; 651596980; NZ_AXVB01000011.1
1785; Butyrivibrio sp. FC2001 G601DRAFT_scaffold00001.1, whole genome
shotgun sequence; 651921804; NZ_KE384132.1
1786; Bacillus bogoriensis ATCC BAA-922 T323DRAFT_scaffold00008.8_C,
whole genome shotgun sequence; 651937013; NZ_JHYI01000013.1
1787; Fischerella sp. PCC 9431 Fis9431DRAFT_Scaffold1.2, whole genome
shotgun sequence; 652326780; NZ_KE650771.1
1788; Fischerella sp. PCC 9605 FIS9605DRAFT_scaffold2.2, whole genome
shotgun sequence; 652337551; NZ_KI912149.1
1789; Clostridium akagii DSM 12554 BR66DRAFT_scaffold00010.10_C,
whole genome shotgun sequence; 652488076; NZ_JMLK01000014.1
1790; Glomeribacter sp. 1016415 H174DRAFT_scaffold00001.1, whole
genome shotgun sequence; 652527059; NZ_KE384226.1
1791; Mesorhizobium sp. URHA0056 H959DRAFT_scaffold00004.4_C,
whole genome shotgun sequence; 652670206; NZ_AUEL01000005.1
1792; Mesorhizobium sp. URHA0056 H959DRAFT_scaffold00004.4_C,
whole genome shotgun sequence; 652670206; NZ_AUEL01000005.1
1793; Mesorhizobium loti R88b Meslo2DRAFT_Scaffold1.1, whole genome
shotgun sequence; 652688269; NZ_KI912159.1
1794; Mesorhizobium loti R88b Meslo2DRAFT_Scaffold1.1, whole genome
shotgun sequence; 652688269; NZ_KI912159.1
1795; Mesorhizobium ciceri WSM4083 MESCI2DRAFT_scaffold_0.1,
whole genome shotgun sequence; 652698054; NZ_KI912610.1
1796; Mesorhizobium sp. URHC0008 N549DRAFT_scaffold00001.1_C,
whole genome shotgun sequence; 652699616; NZ_JIAP01000001.1
1797; Mesorhizobium huakuii 7653R genome; 657121522; CP006581.1
1798; Mesorhizobium erdmanii USDA 3471 A3AUDRAFT_scaffold_7.8_C,
whole genome shotgun sequence; 652719874; NZ_AXAE01000013.1
1799; Mesorhizobium erdmanii USDA 3471 A3AUDRAFT_scaffold_7.8_C,
whole genome shotgun sequence; 652719874; NZ_AXAE01000013.1
1800; Mesorhizobium loti CJ3sym A3A9DRAFT_scaffold_25.26_C, whole
genome shotgun sequence; 652734503; NZ_AXAL01000027.1
1801; Cohnella thermotolerans DSM 17683 G485DRAFT_scaffold00003.3,
whole genome shotgun sequence; 652794305; NZ_KE386956.1
1802; Mesorhizobium sp. WSM3626 Mesw3626DRAFT_scaffold_6.7_C,
whole genome shotgun sequence; 652879634; NZ_AZUY01000007.1
1803; Mesorhizobium sp. WSM1293 MesloDRAFT_scaffold_4.5, whole
genome shotgun sequence; 652910347; NZ_KI911320.1
1804; Legionella pneumophila subsp. pneumophila strain ATCC 33155
contig032, whole genome shotgun sequence; 652971687; NZ_JFIN01000032.1
1805; Legionella pneumophila subsp. pneumophila strain ATCC 33154
Scaffold2, whole genome shotgun sequence; 653016013; NZ_KK074241.1
1806; Legionella pneumophila subsp. pneumophila strain ATCC 33823
Scaffold7, whole genome shotgun sequence; 653016661; NZ_KK074199.1
1807; Bacillus sp. URHB0009 H980DRAFT_scaffold00016.16_C, whole
genome shotgun sequence; 653070042; NZ_AUER01000022.1
1808; Lachnospira multipara MC2003 T520DRAFT_scaffold00007.7_C,
whole genome shotgun sequence; 653225243; NZ_JHWY01000011.1
1809; Rhodanobacter sp. OR87 RhoOR87DRAFT_scaffold_24.25_C, whole
genome shotgun sequence; 653308965; NZ_AXBJ01000026.1
1810; Rhodanobacter sp. OR92 RhoOR92DRAFT_scaffold_6.7_C, whole
genome shotgun sequence; 653321547; NZ_ATYF01000013.1
1811; Rhodanobacter sp. OR444
RHOOR444DRAFT_NODE_5_len_27336_cov_289_843719.5_C, whole
genome shotgun sequence; 653325317; NZ_ATYD01000005.1
1812; Rhodanobacter sp. OR444
RHOOR444DRAFT_NODE_39_len_52063_cov_320_872864.39, whole
genome shotgun sequence; 653330442; NZ_KE386531.1
1813; Bradyrhizobium sp. Aila-2 K288DRAFT_scaffold00086.86_C, whole
genome shotgun sequence; 653556699; NZ_AUEZ01000087.1
1814; Streptomyces sp. CNH099 B121DRAFT_scaffold_16.17_C, whole
genome shotgun sequence; 654239557; NZ_AZWL01000018.1
1815; Mastigocoleus testarum BC008 Contig-2, whole genome shotgun
sequence; 959926096; NZ_LMTZ01000085.1
1816; [Eubacterium] cellulosolvens LD2006 T358DRAFT_scaffold00002.2_C,
whole genome shotgun sequence; 654392970; NZ_JHXY01000005.1
1817; Caulobacter sp. URHA0033 H963DRAFT_scaffold00023.23_C, whole
genome shotgun sequence; 654573246; NZ_AUEO01000025.1
1818; Legionella pneumophila subsp. fraseri strain ATCC 35251 contig031,
whole genome shotgun sequence; 654928151; NZ_JFIG01000031.1
1819; Bacillus sp. FJAT-14578 Scaffold2, whole genome shotgun sequence;
654948246; NZ_KI632505.1
1820; Bacillus sp. 278922 107H622DRAFT_scaffold00001.1, whole genome
shotgun sequence; 654964612; NZ_KI911354.1
1821; Streptomyces sp. SolWspMP-sol2th B083DRAFT_scaffold_17.18_C,
whole genome shotgun sequence; 654969845; NZ_ARPF01000020.1
1822; Ruminococcus flavefaciens ATCC 19208 L870DRAFT_scaffold00001.1,
whole genome shotgun sequence; 655069822; NZ_KI912489.1
1823; Paenibacillus sp. UNCCL52 BR01DRAFT_scaffold00001.1, whole
genome shotgun sequence; 655095448; NZ_KK366023.1
1824; Paenibacillus taiwanensis DSM 18679 H509DRAFT_scaffold00010.10_C,
whole genome shotgun sequence; 655095554; NZ_AULE01000001.1
1825; Paenibacillus sp. UNC451MF BP97DRAFT_scaffold00018.18_C,
whole genome shotgun sequence; 655103160; NZ_JMLS01000021.1
1826; Desulfobulbus japonicus DSM 18378 G493DRAFT_scaffold00011.11_C,
whole genome shotgun sequence; 655133038; NZ_AUCV01000014.1
1827; Novosphingobium sp. B-7 scaffold147, whole genome shotgun
sequence; 514419386; NZ_KE148338.1
1828; Streptomyces flavidovirens DSM 40150 G412DRAFT_scaffold00009.9,
whole genome shotgun sequence; 655416831; NZ_KE386846.1
1829; Terasakiella pusilia DSM 6293 Q397DRAFT_scaffold00039.39_C,
whole genome shotgun sequence; 655499373; NZ_JHYO01000039.1
1830; Pseudoxanthomonas suwonensis J43 Psesu2DRAFT_scaffold_44.45_C,
whole genome shotgun sequence; 655566937; NZ_JAES01000046.1
1831; Salinarimonas rosea DSM 21201 G407DRAFT_scaffold00021.21_C,
whole genome shotgun sequence; 655990125; NZ_AUBC01000024.1
1832; Paenibacillus harenae DSM 16969 H581DRAFT_scaffold00004.4,
whole genome shotgun sequence; 656245934; NZ_KE383845.1
1833; Paenibacillus alginolyticus DSM 5050 = NBRC 15375 strain DSM 5050
G519DRAFT_scaffold00043.43_C, whole genome shotgun sequence;
656249802; NZ_AUGY01000047.1
1834; Bacillus sp. RP1137 contig_18, whole genome shotgun sequence;
657210762; NZ_AXZS01000018.1
1835; Streptomyces leeuwenhoekii strain C34(2013) c34_sequence_0501,
whole genome shotgun sequence; 657301257; NZ_AZSD01000480.1
1836; Brevundimonas bacteroides DSM 4726 Q333DRAFT_scaffold00004.4_C,
whole genome shotgun sequence; 657605746; NZ_JNIX01000010.1
1837; Bacillus thuringiensis LM1212 scaffold_08, whole genome shotgun
sequence; 657629081; NZ_AYPV01000024.1
1838; Lachnoclostridium phytofermentans KNHs212
B010DRAFT_scf7180000000004_quiver.1_C, whole genome shotgun
sequence; 657706549; NZ_JNLM01000001.1
1839; Paenibacillus polymyxa strain NRRL B-30509 contig00003, whole
genome shotgun sequence; 766607514; NZ_JTHO01000003.1
1840; Paenibacillus polymyxa strain WLY78 S6_contig00095, whole genome
shotgun sequence; 657719467; NZ_ALJV01000094.1
1841; Stenotrophomonas maltophilia RR-10 STMALcontig40, whole genome
shotgun sequence; 484978121; NZ_AGRB01000040.1
1842; [Scytonema hofmanni] UTEX 2349 Tol9009DRAFT_TPD.8, whole
genome shotgun sequence; 657935980; NZ_KK073768.1
1843; Caulobacter sp. UNC358MFTsu5.1 BR39DRAFT_scaffold00002.2_C,
whole genome shotgun sequence; 659864921; NZ_JONW01000006.1
1844; Sphingomonas sp. UNC305MFCol5.2 BR78DRAFT_scaffold00001.1_C,
whole genome shotgun sequence; 659889283; NZ_JOOE01000001.1
1845; Streptomyces monomycini strain NRRL B-24309 P063_Doro1_scaffold135,
whole genome shotgun sequence; 662059070; NZ_KL571162.1
1846; Streptomyces peruviensis strain NRRL ISP-5592 P181_Doro1_scaffold152,
whole genome shotgun sequence; 662097244; NZ_KL575165.1
1847; Streptomyces natalensis strain NRRL B-5314 P055_Doro1_scaffold13,
whole genome shotgun sequence; 662108422; NZ_KL570019.1
1848; Streptomyces natalensis ATCC 27448 Scaffold_33, whole genome
shotgun sequence; 764439507; NZ_JRKI01000027.1
1849; Streptomyces baarnensis strain NRRL B-2842 P144_Doro1_scaffold6,
whole genome shotgun sequence; 662129456; NZ_KL573544.1
1850; Streptomyces decoyicus strain NRRL ISP-5087 P056_Doro1_scaffold78,
whole genome shotgun sequence; 662133033; NZ_KL570321.1
1851; Streptomyces baarnensis strain NRRL B-2842 P144_Doro1_scaffold26,
whole genome shotgun sequence; 662135579; NZ_KL573564.1
1852; Streptomyces puniceus strain NRRL ISP-5083 contig3.1, whole genome
shotgun sequence; 663149970; NZ_JOBQ01000003.1
1853; Spirillospora albida strain NRRL B-3350 contig1.1, whole genome
shotgun sequence; 663122276; NZ_JOFJ01000001.1
1854; Streptomyces sp. NRRL S-481 P269_Doro1_scaffold20, whole genome
shotgun sequence; 664428976; NZ_KL585179.1
1855; Streptomyces sp. NRRL S-87 contig69.1, whole genome shotgun
sequence; 663169513; NZ_JO
1856; Streptomyces katrae strain NRRL B-16271 contig33.1, whole genome
shotgun sequence; 663300513; NZ_JNZY01000033.1
1857; Streptomyces katrae strain NRRL B-16271 contig37.1, whole genome
shotgun sequence; 663300941; NZ_JNZY01000037.1
1858; Streptomyces sp. NRRL B-3229 contig5.1, whole genome shotgun
sequence; 663316931; NZ_JOGP01000005.1
1859; Streptomyces griseus subsp. griseus strain NRRL F-2227 contig41.1,
whole genome shotgun sequence; 664325626; NZ_JOIT01000041.1
1860; Streptomyces roseoverticillatus strain NRRL B-3500 contig22.1, whole
genome shotgun sequence; 663372343; NZ_JOFL01000022.1
1861; Streptomyces roseoverticillatus strain NRRL B-3500 contig43.1, whole
genome shotgun sequence; 663373497; NZ_JOFL01000043.1
1862; Streptomyces rimosus subsp. rimosus strain NRRL WC-3924 contig19.1,
whole genome shotgun sequence; 663376433; NZ_JQBW01000019.1
1863; Streptomyces rimosus subsp. rimosus strain NRRL WC-3924 contig82.1,
whole genome shotgun sequence; 663379797; NZ_JOBW01000082.1
1864; Streptomyces sp. NRRL F-5917 contig68.1, whole genome shotgun
sequence; 663414324; NZ_JOHQ01000068.1
1865; Streptomyces sp. NRRL S-1448 contig134.1, whole genome shotgun
sequence; 663421576; NZ_JOGE01000134.1
1866; Allokutzneria albata strain NRRL B-24461 contig22.1, whole genome
shotgun sequence; 663596322; NZ_JOEF01000022.1
1867; Sphingobium sp. DC-2 ODE_45, whole genome shotgun sequence;
663818579; NZ_JNAC01000042.1
1868; Streptomyces aureocirculatus strain NRRL ISP-5386 contig11.1, whole
genome shotgun sequence; 664013282; NZ_JOAP01000011.1
1869; Streptomyces cyaneofuscatus strain NRRL B-2570 contig9.1, whole
genome shotgun sequence; 664021017; NZ_JOEM01000009.1
1870; Streptomyces aureocirculatus strain NRRL ISP-5386 contig49.1, whole
genome shotgun sequence; 664026629; NZ_JOAP01000049.1
1871; Streptomyces sclerotialus strain NRRL B-2317 contig7.1, whole genome
shotgun sequence; 664034500; NZ_JODX01000007.1
1872; Streptomyces anulatus strain NRRL B-2873 contig21.1, whole genome
shotgun sequence; 664049400; NZ_JOEZ01000021.1
1873; Streptomyces globisporus subsp. globisporus strain NRRL B-2709 contig24.1,
whole genome shotgun sequence; 664051798; NZ_JNZK01000024.1
1874; Streptomyces rimosus subsp. rimosus strain NRRL B-2660 contig14.1,
whole genome shotgun sequence; 664052786; NZ_JOES01000014.1
1875; Streptomyces rimosus subsp. rimosus strain NRRL B-2660 contig59.1,
whole genome shotgun sequence; 664061406; NZ_JOES01000059.1
1876; Streptomyces achromogenes subsp. achromogenes strain NRRL B-2120
contig2.1, whole genome shotgun sequence; 664063830; NZ_JODT01000002.1
1877; Streptomyces rimosus subsp. rimosus strain NRRL B-2660 contig124.1,
whole genome shotgun sequence; 664066234; NZ_JOES01000124.1
1878; Streptomyces albus subsp. albus strain NRRL B-2445 contig28.1, whole
genome shotgun sequence; 664095100; NZ_JOED01000028.1
1879; Streptomyces rimosus subsp. rimosus strain NRRL WC-3929 contig5.1,
whole genome shotgun sequence; 664104387; NZ_JOJJ01000005.1
1880; Streptomyces rimosus subsp. rimosus strain NRRL WC-3904 contig10.1,
whole genome shotgun sequence; 664126885; NZ_JOCQ01000010.1
1881; Streptomyces rimosus subsp. rimosus strain NRRL WC-3904
contig106.1, whole genome shotgun sequence; 664141810; NZ_JOCQ01000106.1
1882; Streptomyces griseus subsp. griseus strain NRRL F-5144 contig19.1,
whole genome shotgun sequence; 664184565; NZ_JOGA01000019.1
1883; Streptomyces sp. NRRL F-2295 P395contig79.1, whole genome
shotgun sequence; 926288193; NZ_LGCY01000146.1
1884; Streptomyces xiamenensis strain 318, complete genome; 921170702;
NZ_CP0099222
1885; Streptomyces griseus subsp. griseus strain NRRL F-5618 contig4.1,
whole genome shotgun sequence; 664233412; NZ_JOGN01000004.1
1886; Streptomyces lavenduligriseus strain NRRL ISP-5487 contig2.1, whole
genome shotgun sequence; 664244706; NZ_JOBD01000002.1
1887; Streptomyces lavenduligriseus strain NRRL ISP-5487 contig2.1, whole
genome shotgun sequence; 664244706; NZ_JOBD01000002.1
1888; Streptomyces sp. NRRL S-920 contig3.1, whole genome shotgun
sequence; 664245663; NZ_JODF01000003.1
1889; Streptomyces sp. NRRL S-337 contig41.1, whole genome shotgun
sequence; 664277815; NZ_JOIX01000041.1
1890; Streptomyces griseus strain S4-7 contig113, whole genome shotgun
sequence; 764464761; NZ_JYBE01000113.1
1891; Streptomyces sp. NRRL F-4474 contig32.1, whole genome shotgun
sequence; 664323078; NZ_JOIB01000032.1
1892; Streptomyces sp. NRRL S-475 contig32.1, whole genome shotgun
sequence; 664325162; NZ_JOJB01000032.1
1893; Streptomyces sp. NRRL S-646 contig23.1, whole genome shotgun
sequence; 664421883; NZ_JODC01000023.1
1894; Streptomyces sp. NRRL S-1813 contig13.1, whole genome shotgun
sequence; 664466568; NZ_JOHB01000013.1
1895; Streptomyces sp. NRRL WC-3773 contig2.1, whole genome shotgun
sequence; 664478668; NZ_JOJI01000002.1
1896; Streptomyces sp. NRRL WC-3773 contig36.1, whole genome shotgun
sequence; 664487325; NZ_JOJI01000036.1
1897; Streptomyces olivaceus strain NRRL B-3009 contig20.1, whole genome
shotgun sequence; 664523889; NZ_JOFH01000020.1
1898; Streptomyces ochraceiscleroticus strain NRRL ISP-5594 contig9.1,
whole genome shotgun sequence; 664540649; NZ_JOAX01000009.1
1899; Streptomyces sp. NRRL S-218 P205_Doro1_scaffold2, whole genome
shotgun sequence; 664556736; NZ_KL591003.1
1900; Streptomyces sp. NRRL S-218 P205_Doro1_scaffold34, whole genome
shotgun sequence; 664565137; NZ_KL591029.1
1901; Streptomyces olindensis strain DAUFPE 5622 103, whole genome
shotgun sequence; 739918964; NZ_JJOH01000097.1
1902; Streptomyces sp. NRRL S-623 contig14.1, whole genome shotgun
sequence; 665522165; NZ_JOJC01000016.1
1903; Streptomyces durhamensis strain NRRL B-3309 contig3.1, whole
genome shotgun sequence; 665586974; NZ_JNXR01000003.1
1904; Streptomyces durhamensis strain NRRL B-3309 contig23.1, whole
genome shotgun sequence; 665604093; NZ_JNXR01000023.1
1905; Streptomyces roseochromogenus subsp. oscitans DS 12.976 chromosome,
whole genome shotgun sequence; 566155502; NZ_CM002285.1
1906; Leptolyngbya sp. Heron Island J 50, whole genome shotgun sequence;
553739852; NZ_AWNH01000066.1
1907; Leptolyngbya sp. Heron Island J 50, whole genome shotgun sequence;
553739852; NZ_AWNH01000066.1
1908; Sphingobium lactosutens DS20 contig107, whole genome shotgun
sequence; 544811486; NZ_AIDP01000107.1
1909; Streptomyces sp. NRRL F-5123 contig24.1, whole genome shotgun
sequence; 671535174; NZ_JOHY01000024.1
1910; Bacillus sp. MB2021 T349DRAFT_scaffold00010.10_C, whole
genome shotgun sequence; 671553628; NZ_JNJJ01000011.1
1911; Lachnospira multipara LB2003 T537DRAFT_scaffold00010.10_C,
whole genome shotgun sequence; 671578517; NZ_JNKW01000011.1
1912; Clostridium drakei strain SL1 contig_20, whole genome shotgun
sequence; 692121046; NZ_JIBU02000020.1
1913; Candidatus Paracaedibacter symbiosus strain PRA9 Scaffold_1, whole
genome shotgun sequence; 692233141; NZ_JQAK01000001.1
1914; Stenotrophomonas maltophilia strain 53 contig_2, whole genome
shotgun sequence; 692316574; NZ_JRJA01000002.1
1915; Klebsiella variicola genome assembly Kv4880, contig BN1200_Contig_75,
whole genome shotgun sequence; 906292938; CXPB01000073.1
1916; Streptomyces alboviridis strain NRRL B-1579 contig_18.1, whole
genome shotgun sequence; 695845602; NZ_JNWU01000018.1
1917; Streptomyces sp. CNS654 CD02DRAFT_scaffold00023.23_C, whole
genome shotgun sequence; 695856316; NZ_JNLT01000024.1
1918; Streptomyces albus subsp. albus strain NRRL B-16041 contig26.1,
whole genome shotgun sequence; 695869320; NZ_JNWW01000026.1
1919; Streptomyces sp. JS01 contig2, whole genome shotgun sequence;
695871554; NZ_JPWW01000002.1
1920; Mesorhizobium ciceri CMG6 MescicDRAFT_scaffold_1.2_C, whole
genome shotgun sequence; 639162053; NZ_AWZS01000002.1
1921; Mesorhizobium japonicum R7A MesloDRAFT_Scaffold1.1, whole
genome shotgun sequence; 696358903; NZ_KI632510.1
1922; Stenotrophomonas maltophilia RA8, whole genome shotgun sequence;
493412056; NZ_CALM01000701.1
1923; Streptomyces griseus subsp. griseus strain NRRL B-2307 contig15.1,
whole genome shotgun sequence; 702684649; NZ_JNZI01000015.1
1924; Kitasatospora setae KM-6054 DNA, complete genome; 357386972;
NC_016109.1
1925; Streptomyces lydicus strain NRRL ISP-5461 contig41.1, whole genome
shotgun sequence; 702808005; NZ_JNZA01000041.1
1926; Streptomyces iakyrus strain NRRL ISP-5482 contig6.1, whole genome
shotgun sequence; 702914619; NZ_JNXI01000006.1
1927; Kibdelosporangium aridum subsp. largum strain NRRL B-24462 contig91.4,
whole genome shotgun sequence; 703243970; NZ_JNYM01001429.1
1928; Streptomyces galbus strain KCCM 41354 contig00021, whole genome
shotgun sequence; 716912366; NZ_JRHJ01000016.1
1929; Bacillus aryabhattai strain GZ03 contigl_scaffold1, whole genome
shotgun sequence; 723602665; NZ_JPIE01000001.1
1930; Bacillus mycoides FSL H7-687 Contig052, whole genome shotgun
sequence; 727271768; NZ_ASPY01000052.1
1931; Bacillus weihenstephanensis strain JAS 83/3 Bw_JAS-83/3_contig00005,
whole genome shotgun sequence; 910095435; NZ_JNLY01000005.1
1932; Sphingomonas sp. ERG5 Contig80, whole genome shotgun sequence;
734983422; NZ_JSXI01000079.1
1933; Lachnospira multipara ATCC 19207 G600DRAFT_scaffold00009.9_C,
whole genome shotgun sequence; 653218978; NZ_AUJG01000009.1
1934; Bacillus sp. 72 T409DRAFT_scf7180000000077_quiver.15_C, whole
genome shotgun sequence; 736160933; NZ_JQMI01000015.1
1935; Bacillus simplex BA2H3 scaffold2, whole genome shotgun sequence;
736214556; NZ_KN360955.1
1936; Dehalobacter sp. UNSWDHB Contig_139, whole genome shotgun
sequence; 544905305; NZ_AUUR01000139.1
1937; Actinomadura oligospora ATCC 43269 P696DRAFT_scaffold00008.8_C,
whole genome shotgun sequence; 651281457; NZ_JADG01000010.1
1938; Hyphomonas oceanitis SCH89 contig59, whole genome shotgun
sequence; 737569369; NZ_ARYL01000059.1
1939; Bacillus vietnamensis strain HD-02, whole genome shotgun sequence;
736762362; NZ_CCDN010000009.1
1940; Hyphomonas sp. CY54-11-8 contig4, whole genome shotgun sequence;
736764136; NZ_AWFD01000033.1
1941; Erythrobacter longus strain DSM 6997 contig9, whole genome shotgun
sequence; 736965849; NZ_JMIW01000009.1
1942; Caulobacter henricii strain CF287 EW90DRAFT_scaffold00023.23_C,
whole genome shotgun sequence; 737089868; NZ_JQJN01000025.1
1943; Caulobacter henricii strain YR570 EX13DRAFT_scaffold00022.22_C,
whole genome shotgun sequence; 737103862; NZ_JQJP01000023.1
1944; Calothrix sp. 336/3, complete genome; 821032128; NZ_CP011382.1
1945; Bacillus firmus DS1 scaffold33, whole genome shotgun sequence;
737350949; NZ_APVL01000034.1
1946; Bacillus hemicellulosilyticus JCM 9152, whole genome shotgun
sequence; 737360192; NZ_BAUU01000008.1
1947; Edaphobacter aggregans DSM 19364 Q363DRAFT_scaffold00032.32_C,
whole genome shotgun sequence; 737370143; NZ_JQKI01000040.1
1948; Bacillus sp. UNC322MFChir4.1 BR72DRAFT_scaffold00004.4, whole
genome shotgun sequence; 737456981; NZ_KN050811.1
1949; Hyphomonas oceanitis SCH89 contig20, whole genome shotgun
sequence; 737567115; NZ_ARYL01000020.1
1950; Hyphomonas oceanitis SCH89 contig59, whole genome shotgun
sequence; 737569369; NZ_ARYL01000059.1
1951; Halobacillus sp. BBL2006 cont444, whole genome shotgun sequence;
737576092; NZ_JRNX01000441.1
1952; Hyphomonas atlantica strain 22II1-22F38 contig10, whole genome
shotgun sequence; 737577234; NZ_AWFH01000002.1
1953; Hyphomonas atlantica strain 22II1-22F38 contig28, whole genome
shotgun sequence; 737580759; NZ_AWFH01000021.1
1954; Hyphomonas jannaschiana VP2 contig2, whole genome shotgun
sequence; 737608363; NZ_ARYJ01000002.1
1955; Bacillus akibai JCM 9157, whole genome shotgun sequence;
737696658; NZ_BAUV01000025.1
1956; Frankia sp. CeD CEDDRAFT_scaffold_22.23, whole genome shotgun
sequence; 737947180; NZ_JPGU01000023.1
1957; Clostridium butyricum strain NEC8, whole genome shotgun sequence;
960334134; NZ_CBYK010000003.1
1958; Clostridium butyricum AGR2140 G607DRAFT_scaffold00008.8_C,
whole genome shotgun sequence; 653632769; NZ_AUJN01000009.1
1959; Fusobacterium necrophorum BFTR-2 contig0075, whole genome
shotgun sequence; 737951550; NZ_JAAG01000075.1
1960; [Leptolyngbya] sp. JSC-1
Osccy1DRAFT_CYJSC1_DRAF_scaffold00069.1, whole genome shotgun
sequence; 738050739; NZ_KL662191.1
1961; Bradyrhizobium sp. WSM1743 YU9DRAFT_scaffold_1.2_C, whole
genome shotgun sequence; 653526890; NZ_AXAZ01000002.1
1962; Mesorhizobium sp. WSM3224 YU3DRAFT_scaffold_3.4_C, whole
genome shotgun sequence; 652912253; NZ_ATYO01000004.1
1963; Myxosarcina sp. GI1 contig_5, whole genome shotgun sequence;
738529722; NZ_JRFE01000006.1
1964; Novosphingobium resinovorum strain KF1 contig000002, whole
genome shotgun sequence; 738613868; NZ_JFYZ01000002.1
1965; Paenibacillus sp. FSL H7-689 Contig015, whole genome shotgun
sequence; 738716739; NZ_ASPU01000015.1
1966; Paenibacillus wynnii strain DSM 18334 unitig_2, whole genome
shotgun sequence; 738760618; NZ_JQCR01000002.1
1967; Paenibacillus sp. FSL R7-269 Contig022, whole genome shotgun
sequence; 738803633; NZ_ASPS01000022.1
1968; Paenibacillus pinihumi DSM 23905 = JCM 16419 strain DSM 23905
H583DRAFT_scaffold00005.5, whole genome shotgun sequence; 655115689;
NZ_KE383867.1
1969; Paenibacillus harenae DSM 16969 H581DRAFT_scaffold00002.2,
whole genome shotgun sequence; 655165706; NZ_KE383843.1
1970; Paenibacillus sp. FSL R7-277 Contig088, whole genome shotgun
sequence; 738841140; NZ_ASPX01000088.1
1971; Pseudonocardia acaciae DSM 45401 N912DRAFT_scaffold00002.2_C,
whole genome shotgun sequence; 655569633; NZ_JIAI01000002.1
1972; Amycolatopsis orientalis DSM 40040 = KCTC 9412 contig_32, whole
genome shotgun sequence; 499136900; NZ_ASJB01000015.1
1973; Sphingobium chlorophenolicum strain NBRC 16172 contig000025,
whole genome shotgun sequence; 739594477; NZ_JFHR01000025.1
1974; Sphingobium herbicidovorans NBRC 16415 contig000028, whole
genome shotgun sequence; 739610197; NZ_JFZA02000028.1
1975; Sphingobium sp. ba1 seq0028, whole genome shotgun sequence;
739622900; NZ_JPPQ01000069.1
1976; Sphingomonas paucimobilis strain EPA505 contig000016, whole
genome shotgun sequence; 739629085; NZ_JFYY01000016.1
1977; Sphingomonas paucimobilis strain EPA505 contig000027, whole
genome shotgun sequence; 739630357; NZ_JFYY01000027.1
1978; Sphingobium yanoikuyae ATCC 51230 supercont1.1, whole genome
shotgun sequence; 427407324; NZ_JH992904.1
1979; Sphingobium yanoikuyae strain B1 scaffold28, whole genome shotgun
sequence; 739656825; NZ_KL662220.1
1980; Sphingobium yanoikuyae strain B1 contig000002, whole genome
shotgun sequence; 739661773; NZ_JGVR01000002.1
1981; Sphingomonas wittichii strain YR128 EX04DRAFT_scaffold00050.50_C,
whole genome shotgun sequence; 739674258; NZ_JQMC01000050.1
1982; Sphingomonas sp. SKA58 scf_1100007010440, whole genome shotgun
sequence; 211594417; NZ_CH959308.1
1983; Sphingopyxis sp. LC363 contig1, whole genome shotgun sequence;
739699072; NZ_JNFC01000001.1
1984; Sphingopyxis sp. LC363 contig30, whole genome shotgun sequence;
739701660; NZ_JNFC01000024.1
1985; Sphingopyxis sp. LC363 contig5, whole genome shotgun sequence;
739702995; NZ_JNFC01000045.1
1986; Streptococcus salivarius strain NU10 contig_11, whole genome shotgun
sequence; 739748927; NZ_JJMT01000011.1
1987; Streptomyces griseoluteus strain NRRL ISP-5360 contig43.1, whole
genome shotgun sequence; 663180071; NZ_JOBE01000043.1
1988; Streptomyces griseorubens strain JSD-1 contig143, whole genome
shotgun sequence; 657284919; JJMG01000143.1
1989; Streptomyces avermitilis MA-4680 = NBRC 14893, complete genome;
162960844; NC_003155.4
1990; Streptomyces achromogenes subsp. achromogenes strain NRRL B-2120
contig2.1, whole genome shotgun sequence; 664063830; NZ_JODT01000002.1
1991; Streptomyces griseus subsp. griseus strain NRRL WC-3645 contig40.1,
whole genome shotgun sequence; 739830264; NZ_JOJE01000040.1
1992; Streptomyces scabiei strain NCPPB 4086 scf_65433_365.1, whole
genome shotgun sequence; 739854483; NZ_KL997447.1
1993; Streptomyces sp. FXJ7.023 Contig10, whole genome shotgun sequence;
510871397; NZ_APIV01000010.1
1994; Streptomyces sp. PRh5 contig001, whole genome shotgun sequence;
740097110; NZ_JABQ01000001.1
1995; Paenibacillus sp. FSL H7-0357, complete genome; 749299172;
NZ_CP009241.1
1996; Paenibacillus stellifer strain DSM 14472, complete genome; 753871514;
NZ_CP009286.1
1997; Burkholderia pseudomallei strain MSHR4018 scaffold2, whole genome
shotgun sequence; 740942724; NZ_KN323080.1
1998; Burkholderia sp. ABCPW 111 X946.contig-100_0, whole genome
shotgun sequence; 740958729; NZ_JPWT01000001.1
1999; Cupriavidus sp. IDO NODE_7, whole genome shotgun sequence;
742878908; NZ_JWMA01000006.1
2000; Paenibacillus polymyxa strain DSM 365 Contig001, whole genome
shotgun sequence; 746220937; NZ_JMIQ01000001.1
2001; Paenibacillus polymyxa strain CF05 genome; 746228615;
NZ_CP009909.1
2002; Novosphingobium malaysiense strain MUSC 273 Contig9, whole
genome shotgun sequence; 746241774; NZ_JTDI01000009.1
2003; Paenibacillus sp. IHB B 3415 contig_069, whole genome shotgun
sequence; 746258261; NZ_JUEI01000069.1
2004; Novosphingobium subterraneum strain DSM 12447 NJ75_contig000013,
whole genome shotgun sequence; 746288194; NZ_JRVC01000013.1
2005; Pandoraea sputorum strain DSM 21091, complete genome; 749204399;
NZ_CP010431.1
2006; Xanthomonas cannabis pv. cannabis strain NCPPB 3753 contig_67,
whole genome shotgun sequence; 746366822; NZ_JSZF01000067.1
2007; Xanthomonas arboricola pv. pruni MAFF 301420 strain MAFF301420,
whole genome shotgun sequence; 759376814; NZ_BAVC01000017.1
2008; Xanthomonas arboricola pv. celebensis strain NCPPB 1630 scf_49108_10.1,
whole genome shotgun sequence; 746486416; NZ_KL638873.1
2009; Xanthomonas arboricola pv. celebensis strain NCPPB 1832 scf_23466_141.1,
whole genome shotgun sequence; 746494072; NZ_KL638866.1
2010; Xanthomonas cannabis pv. cannabis strain NCPPB 2877 contig_94,
whole genome shotgun sequence; 746532813; NZ_JSZE01000094.1
2011; Sphingopyxis fribergensis strain Kp5.2, complete genome; 749188513;
NZ_CP009122.1
2012; Sphingopyxis fribergensis strain Kp5.2, complete genome; 749188513;
NZ_CP009122.1
2013; Streptomyces sp. 769, complete genome; 749181963; NZ_CP003987.1
2014; Hassallia byssoidea VB512170 scaffold_0, whole genome shotgun
sequence; 748181452; NZ_JTCM01000043.1
2015; Jeotgalibacillus malaysiensis strain D5 chromosome, complete genome;
749182744; NZ_CP009416.1
2016; Paenibacillus sp. FSL R7-0273, complete genome; 749302091;
NZ_CP009283.1
2017; Paenibacillus polymyxa strain Sb3-1, complete genome; 749204146;
NZ_CP010268.1
2018; Klebsiella pneumoniae CCHB01000016, whole genome shotgun
sequence; 749639368; NZ_CCHB01000016.1
2019; Streptomyces albus strain DSM 41398, complete genome; 749658562;
NZ_CP010519.1
2020; Streptomonospora alba strain YIM 90003 contig_9, whole genome
shotgun sequence; 749673329; NZ_JROO01000009.1
2021; Uncultured marine bacterium 463 clone EBAC080-L32B05 genomic
sequence; 41582259; AY458641.2
2022; Nocardiopsis chromatogenes YIM 90109 contig_59, whole genome
shotgun sequence; 484026076; NZ_ANBH01000059.1
2023; Paenibacillus dendritiformis C454 PDENDC1000064, whole genome
shotgun sequence; 374605177; NZ_AHKH01000064.1
2024; Streptomyces auratus AGR0001 Scaffold1_85, whole genome shotgun
sequence; 396995461; AJGV01000085.1
2025; Tolypothrix campylonemoides VB511288 scaffold_0, whole genome
shotgun sequence; 751565075; NZ_JXCB01000004.1
2026; Jeotgalibacillus soli strain P9 contig00009, whole genome shotgun
sequence; 751619763; NZ_JXRP01000009.1
2027; Cylindrospermum stagnate PCC 7417, complete genome; 434402184;
NC_019757.1
2028; Sphingopyxis alaskensis RB2256, complete genome; 103485498;
NC_008048.1
2029; Syntrophobotulus glycolicus DSM 8271, complete genome; 325288201;
NC_015172.1
2030; Novosphingobium aromaticivorans DSM 12444, complete genome;
87198026; NC_007794.1
2031; Novosphingobium sp. PP1Y Lpl large plasmid, complete replicon;
334133217; NC_015579.1
2032; Bacillus sp. 1NLA3E, complete genome; 488570484; NC_021171.1
2033; Burkholderia rhizoxinica HKI 454, complete genome; 312794749;
NC_014722.1
2034; Psychromonas ingrahamii 37, complete genome; 119943794;
NC_008709.1
2035; Streptococcus salivarius JIM8777 complete genome; 387783149;
NC_017595.1
2036; Actinosynnema mirum DSM 43827, complete genome; 256374160;
NC_013093.1
2037; Legionella pneumophila 2300/99 Alcoy, complete genome; 296105497;
NC_014125.1
2038; Paenibacillus sp. FSL R5-0912, complete genome; 754884871;
NZ_CP009282.1
2039; Streptomyces sp. NBRC 110027, whole genome shotgun sequence;
754788309; NZ_BBNO01000002.1
2040; Streptomyces sp. NBRC 110027, whole genome shotgun sequence;
754796661; NZ_BBNO01000008.1
2041; Paenibacillus sp. FSL R7-0331, complete genome; 754821094;
NZ_CP009284.1
2042; Kibdelosporangium sp. MJ126-NF4, whole genome shotgun sequence;
754819815; NZ_CDME01000002.1
2043; Paenibacillus camerounensis strain G4, whole genome shotgun
sequence; 754841195; NZ_CCDG010000069.1
2044; Paenibacillus borealis strain DSM 13188, complete genome;
754859657; NZ_CP009285.1
2045; Legionella pneumophila serogroup 1 strain TUM 13948, whole genome
shotgun sequence; 754875479; NZ_BAYQ01000013.1
2046; Streptacidiphilus neutrinimicus strain NBRC 100921, whole genome
shotgun sequence; 755016073; NZ_BBPO01000030.1
2047; Streptacidiphilus melanogenes strain NBRC 103184, whole genome
shotgun sequence; 755032408; NZ_BBPP01000024.1
2048; Streptacidiphilus anmyonensis strain NBRC 103185, whole genome
shotgun sequence; 755077919; NZ_BBPQ01000048.1
2049; Streptacidiphilus jiangxiensis strain NBRC 100920, whole genome
shotgun sequence; 755108320; NZ_BBPN01000056.1
2050; Mesorhizobium sp. ORS3359, whole genome shotgun sequence;
756828038; NZ_CCNC01000143.1
2051; Bacillus megaterium WSH-002, complete genome; 384044176;
NC_017138.1
2052; Aneurinibacillus migulanus strain Nagano E1 contig_36, whole genome
shotgun sequence; 928874573; NZ_LIXL01000208.1
2053; Sphingobium sp. Ant17 Contig_90, whole genome shotgun sequence;
759431957; NZ_JEMV01000094.1
2054; Pseudomonas sp. HMP271 Pseudomonas_HMP271_contig_7, whole
genome shotgun sequence; 759578528; NZ_JMFZ01000007.1
2055; Streptomyces luteus strain TRM 45540 Scaffold1, whole genome
shotgun sequence; 759659849; NZ_KN039946.1
2056; Streptomyces nodosus strain ATCC 14899 genome; 759739811;
NZ_CP009313.1
2057; Streptomyces fradiae strain ATCC 19609 contig0008, whole genome
shotgun sequence; 759752221; NZ_JNAD01000008.1
2058; Streptomyces bingchenggensis BCW-1, complete genome; 374982757;
NC_016582.1
2059; Streptomyces glaucescens strain GLA.O, complete genome; 759802587;
NZ_CP009438.1
2060; Novosphingobium sp. Rr 2-17 contig98, whole genome shotgun
sequence; 393773868; NZ_AKFJ01000097.1
2061; Nonomuraea Candida strain NRRL B-24552 contig27.1, whole genome
shotgun sequence; 759944049; NZ_JOAG01000029.1
2062; Nonomuraea Candida strain NRRL B-24552 contig28.1, whole genome
shotgun sequence; 759944490; NZ_JOAG01000030.1
2063; Nonomuraea Candida strain NRRL B-24552 contig42.1, whole genome
shotgun sequence; 759948103; NZ_JOAG01000045.1
2064; Paenibacillus polymyxa E681, complete genome; 864439741;
NC_014483.2
2065; Xanthomonas hortorum pv. carotae str. M081 chromosome, whole
genome shotgun sequence; 565808720; NZ_CM002307.1
2066; Novosphingobium sp. P6W scaffold3, whole genome shotgun sequence;
763092879; NZ_JXZE01000003.1
2067; Novosphingobium sp. P6W scaffold9, whole genome shotgun sequence;
763095630; NZ_JXZE01000009.1
2068; Sphingomonas hengshuiensis strain WHSC-8, complete genome;
764364074; NZ_CP010836.1
2069; Streptomyces ahygroscopicus subsp. wuyiensis strain CK-15 contig3,
whole genome shotgun sequence; 921220646; NZ_JXYI02000059.1
2070; Streptomyces cyaneogriseus subsp. noncyanogenus strain NMWT 1,
complete genome; 764487836; NZ_CP010849.1
2071; Bacillus subtilis subsp. spizizenii RFWG1A4 contig00010, whole
genome shotgun sequence; 764657375; NZ_AJHM01000010.1
2072; Mastigocladus laminosus UU774 scaffold_22, whole genome shotgun
sequence; 764671177; NZ_JXUO1000139.1
2073; Moorea producens 3L scf52052, whole genome shotgun sequence;
332710285; NZ_GL890953.1
2074; Streptomyces iranensis genome assembly Siranensis, scaffold
SCAF00002; 765016627; NZ_LK022849.1
2075; Risungbinella massiliensis strain GD1, whole genome shotgun sequence;
765315585; NZ_LN812103.1
2076; Sphingobium sp. YBL2, complete genome; 765344939; NZ_CP010954.1
2077; Streptococcus suis strain LS5J, whole genome shotgun sequence;
765394696; NZ_CEEZ01000028.1
2078; Streptococcus suis strain LS8I, whole genome shotgun sequence;
766595491; NZ_CEHM01000004.1
2079; Thalassospira sp. HJ NODE_2, whole genome shotgun sequence;
766668420; NZ_JYII01000010.1
2080; Frankia sp. CpI1-P FF86_1013, whole genome shotgun sequence;
946950294; NZ_LJJX01000013.1
2081; Streptococcus suis strain B28P, whole genome shotgun sequence;
769231516; NZ_CDTB01000010.1
2082; Streptomyces sp. NRRL F-4428 contig40.2, whole genome shotgun
sequence; 772774737; NZ_JYJI01000131.1
2083; Bacterium endosymbiont of Mortierella elongata FMR23-6, whole
genome shotgun sequence; 779889750; NZ_DF850521.1
2084; Streptomyces sp. FxanaA7 F611DRAFT_scaffold00041.41_C, whole
genome shotgun sequence; 780340655; NZ_LACL01000054.1
2085; Streptomyces rubellomurinus strain ATCC 31215 contig-63, whole
genome shotgun sequence; 783211546; NZ_JZKH01000064.1
2086; Streptomyces rubellomurinus subsp. indigofems strain ATCC 31304
contig-55, whole genome shotgun sequence; 783374270; NZ_JZKG01000056.1
2087; Bacillus sp. UMTAT18 contig000011, whole genome shotgun
sequence; 806951735; NZ_JSFD01000011.1
2088; Paenibacillus wulumuqiensis strain Y24 Scaffold4, whole genome
shotgun sequence; 808051893; NZ_KQ040793.1
2089; Paenibacillus dauci strain H9 Scaffold3, whole genome shotgun
sequence; 808064534; NZ_KQ040798.1
2090; Paenibacillus algorifonticola strain XJ259 Scaffold20_1, whole genome
shotgun sequence; 808072221; NZ_LAQO01000025.1
2091; Xanthomonas campestris strain 17, complete genome; 810489403;
NZ_CP011256.1
2092; Bacillus sp. SA1-12 scf7180000003378, whole genome shotgun
sequence; 817541164; NZ_LATZ01000026.1
2093; Spirosoma radiotolerans strain DG5A, complete genome; 817524426;
NZ_CP010429.1
2094; Streptomyces lydicus A02, complete genome; 822214995; NZ_CP007699.1
2095; Streptomyces lydicus A02, complete genome; 822214995; NZ_CP007699.1
2096; Bacillus cereus strain B4147 NODE_5, whole genome shotgun
sequence; 822530609; NZ_LCYN01000004.1
2097; Xanthomonas pisi DSM 18956 Contig_28, whole genome shotgun
sequence; 822535978; NZ_JPLE01000028.1
2098; Erythrobacter luteus strain KA37 contig1, whole genome shotgun
sequence; 822631216; NZ_LBHB01000001.1
2099; Xanthomonas arboricola strain CFBP 7634 Xarjug-CFBP7634-G11,
whole genome shotgun sequence; 825139250; NZ_JZEH01000001.1
2100; Xanthomonas arboricola strain CFBP 7651 Xarjug-CFBP7651-G11,
whole genome shotgun sequence; 825156557; NZ_JZEI01000001.1
2101; Luteimonas sp. FCS-9 scf7180000000225, whole genome shotgun
sequence; 825314716; NZ_LASZ01000002.1
2102; Streptomyces sp. KE1 Contig11, whole genome shotgun sequence;
82535362ENZ_LAYX01000011.1
2103; Streptomyces sp. M10 Scaffold2, whole genome shotgun sequence;
835355240; NZ_KN549147.1
2104; Xanthomonas cannabis pv. phaseoli strain Nyagatare scf_52938_7,
whole genome shotgun sequence; 835885587; NZ_KN265462.1
2105; Bacillus aryabhattai strain T61 Scaffold1, whole genome shotgun
sequence; 836596561; NZ_KQ087173.1
2106; Paenibacillus sp. TCA20, whole genome shotgun sequence; 843088522;
NZ_BBIW01000001.1
2107; Bacillus circulans strain RIT379 contig11, whole genome shotgun
sequence; 844809159; NZ_LDPH01000011.1
2108; Ornithinibacillus californiensis strain DSM 16628 contig_22, whole
genome shotgun sequence; 849059098; NZ_LDUE01000022.1
2109; Bacillus pseudalcaliphilus strain DSM 8725 super11, whole genome
shotgun sequence; 849078078; NZ_LFJO01000006.1
2110; Bacillus aryabhattai strain LK25 16, whole genome shotgun sequence;
850356871; NZ_LDWN01000016.1
2111; Methanobacterium arcticum strain M2 EI99DRAFT_scaffold00005.5_C,
whole genome shotgun sequence; 851140085; NZ_JQKN01000008.1
2112; Methanobacterium sp. SMA-27 DL91DRAFT_unitig_0_quiver.1_C,
whole genome shotgun sequence; 851351157; NZ_JQLY01000001.1
2113; Cellulomonas sp. A375-1 contig_129, whole genome shotgun sequence;
856992287; NZ_LFKW01000127.1
2114; Streptomyces sp. HNS054 contig28, whole genome shotgun sequence;
860547590; NZ_LDZX01000028.1
2115; Bacillus cereus strain RIMV BC 126 212, whole genome shotgun
sequence; 872696015; NZ_LABO01000035.1
2116; Sphingomonas sp. MEA3-1 contig00021, whole genome shotgun
sequence; 873296042; NZ_LECE01000021.1
2117; Sphingomonas sp. MEA3-1 contig00040, whole genome shotgun
sequence; 873296160; NZ_LECE01000040.1
2118; Bacillus sp. 220_BSPC 1447_75439_1072255, whole genome shotgun
sequence; 880954155; NZ_JVPL01000109.1
2119; Bacillus sp. 522_BSPC 2470_72498_1083579_594_{——}. . ._522_, whole
genome shotgun sequence; 880997761; NZ_JVDT01000118.1
2120; Streptomyces ipomoeae 91-03 gcontig_1108499710267, whole genome
shotgun sequence; 429195484; NZ_AEJC01000118.1
2121; Scytonema tolypothrichoides VB-61278 scaffold_6, whole genome
shotgun sequence; 890002594; NZ_JXCA01000005.1
2122; Erythrobacter atlanticus strain s21-N3, complete genome; 890444402;
NZ_CP011310.1
2123; Sphingobium yanoikuyae strain SHJ scaffold12, whole genome shotgun
sequence; 893711343; NZ_KQ235994.1
2124; Sphingobium yanoikuyae strain SHJ scaffold33, whole genome shotgun
sequence; 893711364; NZ_KQ236015.1
2125; Sphingobium yanoikuyae strain SHJ scaffold47, whole genome shotgun
sequence; 893711378; NZ_KQ236029.1
2126; Stenotrophomonas maltophilia strain 544_SMAL
1161_223966_2976806_599_{——}. . ._882_, whole genome shotgun sequence;
896492362; NZ_JVCU01000107.1
2127; Stenotrophomonas maltophilia strain 131_SMAL
1126_236170_8501292_717_{——}. . ._1018_, whole genome shotgun sequence;
896520167; NZ_JVUI01000038.1
2128; Stenotrophomonas maltophilia stain 951_SMAL 71_125859_2268311,
whole genome shotgun sequence; 896567682; NZ_JUMH01000022.1
2129; Stenotrophomonas maltophilia strain OC194 contig_98, whole genome
shotgun sequence; 930169273; NZ_LJJH01000098.1
2130; Streptococcus pseudopneumoniae stain 445_SPSE
347_91401_2272315_318_{——}. . ._319_, whole genome shotgun sequence;
896667361; NZ_JVGV01000030.1
2131; Streptomyces caatingaensis strain CMAA 1322 contig02, whole genome
shotgun sequence; 906344334; NZ_LFXA01000002.1
2132; Streptomyces caatingaensis strain CMAA 1322 contig02, whole genome
shotgun sequence; 906344334; NZ_LFXA01000002.1
2133; Streptomyces caatingaensis strain CMAA 1322 contig07, whole genome
shotgun sequence; 906344339; NZ_LFXA01000007.1
2134; Sphingopyxis alaskensis RB2256, complete genome; 103485498; NC_008048.1
2135; Sphingomonas wittichii RW1, complete genome; 148552929; NC_009511.1
2136; Caulobacter sp. K31, complete genome; 167643973; NC_010338.1
2137; Asticcacaulis excentricus CB 48 chromosome 2, complete sequence;
315499382; NC_014817.1
2138; Nocardiopsis dassonvillei subsp. dassonvillei DSM 43111 chromosome
1, complete sequence; 297558985; NC_014210.1
2139; Streptomyces wadayamensis strain A23 LGO_A23_AS7_CO0257,
whole genome shotgun sequence; 910050821; NZ_JHDU01000034.1
2140; Tolypothrix bouteillei VB521301 scaffold_1, whole genome shotgun
sequence; 910242069; NZ_JHEG02000048.1
2141; Silvibacterium bohemicum strain S15 contig_3, whole genome shotgun
sequence; 910257956; NZ_LBHJ01000003.1
2142; Silvibacterium bohemicum strain S15 contig_3, whole genome shotgun
sequence; 910257956; NZ_LBHJ01000003.1
2143; Silvibacterium bohemicum strain S15 contig_30, whole genome shotgun
sequence; 910257973; NZ_LBHJ01000020.1
2144; Streptomyces sp. NRRL WC-3773 contig11.1, whole genome shotgun
sequence; 664481891; NZ_JOJI01000011.1
2145; Streptomyces peucetius strain NRRL WC-3868 contig49.1, whole
genome shotgun sequence; 665671804; NZ_JOCK01000052.1
2146; Xanthomonas citri pv. mangiferaeindicae LMG 941, whole genome
shotgun sequence; 381171950; NZ_CAHO01000029.1
2147; Mesorhizobium sp. L2C084A000 scaffold0007, whole genome shotgun
sequence; 563938926; NZ_AYWX01000007.1
2148; Erythrobacter citreus LAMA 915 Contig13, whole genome shotgun
sequence; 914607448; NZ_JYNE01000028.1
2149; Bacillus flexus strain Riq5 contig_32, whole genome shotgun sequence;
914730676; NZ_LFQJ01000032.1
2150; Rhodanobacter thiooxydans LCS2 contig057, whole genome shotgun
sequence; 389809081; NZ_AJXW01000057.1
2151; Frankia alni str. ACN14A chromosome, complete sequence;
111219505; NC_008278.1
2152; Novosphingobium sp. PP1Y main chromosome, complete replicon;
334139601; NC_015580.1
2153; Salinibacter ruber M8 chromosome, complete genome; 294505815;
NC_014032.1
2154; Nocardiopsis salina YIM 90010 contig_87, whole genome shotgun
sequence; 484023389; NZ_ANBF01000087.1
2155; Kitasatospora setae KM-6054 DNA, complete genome; 357386972;
NC_016109.1
2156; Arthrobacter sp. 161MFSha2.1 C567DRAFT_scaffold00006.6, whole
genome shotgun sequence; 484021228; NZ_KB895788.1
2157; Lamprocystis purpurea DSM 4197 A39ODRAFT_scaffold_0.1, whole
genome shotgun sequence; 483254584; NZ_KB902362.1
2158; Streptomyces sp. ATexAB-D23 B082DRAFT_scaffold_0.1, whole
genome shotgun sequence; 483975550; NZ_KB892001.1
2159; Lunatimonas lonarensis strain AK24 S14_contig_18, whole genome
shotgun sequence; 499123840; NZ_AQHR01000021.1
2160; Amycolatopsis benzoatilytica AK 16/65 AmybeDRAFT_scaffold1.1,
whole genome shotgun sequence; 486399859; NZ_KB912942.1
2161; Nocardia transvalensis NBRC 15921, whole genome shotgun sequence;
485125031; NZ_BAGL01000055.1
2162; Sphingomonas sp. YL-JM2C contig056, whole genome shotgun
sequence; 661300723; NZ_ASTM01000056.1
2163; Butyrivibrio sp. XBB1001 G631DRAFT_scaffold00005.5_C, whole
genome shotgun sequence; 651376721; NZ_AUKA01000006.1
2164; Butyrivibrio fibrisolvens MD2001 G635DRAFT_scaffold00033.33_C,
whole genome shotgun sequence; 652963937; NZ_AUKD01000034.1
2165; Butyrivibrio sp.NC3005 G634DRAFT_scaffold00001.1, whole
genome shotgun sequence; 651394394; NZ_KE384206.1
2166; Shimazuella kribbensis DSM 45090 A3GQDRAFT_scaffold_0.1_C,
whole genome shotgun sequence; 655370026; NZ_ATZF01000001.1
2167; Shimazuella kribbensis DSM 45090 A3GQDRAFT_scaffold_5.6_C,
whole genome shotgun sequence; 655371438; NZ_ATZF01000006.1
2168; Desulfobulbus mediterraneus DSM 13871 G494DRAFT_scaffold00028.28_C,
whole genome shotgun sequence; 655138083; NZ_AUCW01000035.1
2169; Cohnella thermotolerans DSM 17683 G485DRAFT_scaffold00041.41_C,
whole genome shotgun sequence; 652787974; NZ_AUCP01000055.1
2170; Azospirillum halopraeferens DSM 3675 G472DRAFT_scaffold00039.39_C,
whole genome shotgun sequence; 655967838; NZ_AUCF01000044.1
2171; Bacillus kribbensis DSM 17871 H539DRAFT_scaffold00003.3, whole
genome shotgun sequence; 651983111; NZ_KE387239.1
2172; Leptolyngbya sp. Heron Island J 67, whole genome shotgun sequence;
553740975; NZ_AWNH01000084.1
2173; Streptomyces sp. GXT6 genomic scaffold Scaffold4, whole genome
shotgun sequence; 654975403; NZ_KI601366.1
2174; Promicromonospora kroppenstedtii DSM 19349 ProkrDRAFT_PKA.71,
whole genome shotgun sequence; 739097522; NZ_KI911740.1
2175; Bacillus sp. J37 BacJ37DRAFT_scaffold_0.1_C, whole genome
shotgun sequence; 651516582; NZ_JAEK01000001.1
2176; Prevotella oryzae DSM 17970 XylorDRAFT_XOA.1, whole genome
shotgun sequence; 738999090; NZ_KK073873.1
2177; Sphingobium sp. Antl7 Contig 45, whole genome shotgun sequence;
759429528; NZ_JEMV01000036.1
2178; Rubellimicrobium mesophilum DSM 19309 scaffold23, whole genome
shotgun sequence; 739419616; NZ_KK088564.1
2179; Butyrivibrio sp. MC2021 T359DRAFT_scaffold00010.10_C, whole
genome shotgun sequence; 651407979; NZ_JHXX01000011.1
2180; Clostridium beijerinckii HUN142 T483DRAFT_scaffold00004.4, whole
genome shotgun sequence; 652494892; NZ_KK211337.1
2181; Streptomyces sp. Tu 6176 scaffold00003, whole genome shotgun
sequence; 740044478; NZ_KK106990.1
2182; Novosphingobium resinovorum strain KF1 contig000008, whole
genome shotgun sequence; 738615271; NZ_JFYZ01000008.1
2183; Novosphingobium resinovorum strain KF1 contig000015, whole
genome shotgun sequence; 738617000; NZ_JFYZ01000015.1
2184; Hyphomonas chukchiensis strain BH-BN04-4 contig29, whole genome
shotgun sequence; 736736050; NZ_AWFG01000029.1
2185; Thioclava dalianensis strain DLFJ1-1 contig2, whole genome shotgun
sequence; 740220529; NZ_JHEH01000002.1
2186; Thioclava indica strain DT23-4 contig29, whole genome shotgun
sequence; 740292158; NZ_AUNB01000028.1
2187; Streptomyces albus subsp. albus strain NRRL B-1811 contig32.1, whole
genome shotgun sequence; 665618015; NZ_JODR01000032.1
2188; Kitasatospora sp. MBT66 scaffold3, whole genome shotgun sequence;
759755931; NZ_JAIY01000003.1
2189; Sphingomonas sp. DC-6 scaffold87, whole genome shotgun sequence;
662140302; NZ_JMUB01000087.1
2190; Sphingobium chlorophenolicum strain NBRC 16172 contig000062,
whole genome shotgun sequence; 739598481; NZ_JFHR01000062.1
2191; Nocardia sp. NRRL WC-3656 contig2.1, whole genome shotgun
sequence; 663737675; NZ_JOJF01000002.1
2192; Streptomyces flavochromogenes strain NRRL B-2684 contig8.1, whole
genome shotgun sequence; 663317502; NZ_JNZO01000008.1
2193; Bacillus indicus strain DSM 16189 Contig01, whole genome shotgun
sequence; 737222016; NZ_JNVC02000001.1
2194; Streptomyces bicolor strain NRRL B-3897 contig42.1, whole genome
shotgun sequence; 671498318; NZ_JOFR01000042.1
2195; Streptomyces sp. NRRL WC-3719 contig152.1, whole genome shotgun
sequence; 665536304; NZ_JOCD01000152.1
2196; Streptomyces sp. NRRL F-5053 contig1.1, whole genome shotgun
sequence; 664356765; NZ_JOHT01000001.1
2197; Streptomyces sp. NRRL S-1868 contig54.1, whole genome shotgun
sequence; 664360925; NZ_JQGD01000054.1
2198; Streptomyces hygroscopicus subsp. hygroscopicus strain NRRL B-1477
contig8.1, whole genome shotgun sequence; 664299296; NZ_JOIK01000008.1
2199; Desulfobacter vibriofonnis DSM 8776 Q366DRAFT_scaffold00036.35_C,
whole genome shotgun sequence; 737257311; NZ_JQKJ01000036.1
2200; Brevundimonas sp. EAKA contig5, whole genome shotgun sequence;
737322991; NZ_JMQR01000005.1
2201; Brevundimonas sp. EAKA contig5, whole genome shotgun sequence;
73732299ENZ_JMQR01000005.1
2202; Actinokineospora spheciospongiae strain EG49 contig1268_1, whole
genome shotgun sequence; 737301464; NZ_AYXG01000139.1
2203; Sphingobium sp. ba1 seq0028, whole genome shotgun sequence;
739622900; NZ_JPPQ01000069.1
2204; Rotlria dentocariosa strain C6B contig_5, whole genome shotgun
sequence; 739372122; NZ_JQHE01000003.1
2205; Rhodococcus fascians A21d2 contig10, whole genome shotgun
sequence; 739287390; NZ_JMFA01000010.1
2206; Rhodococcus fascians LMG 3625 contig38, whole genome shotgun
sequence; 694033726; NZ_JMEM01000016.1
2207; Sphingopyxis sp. MWB1 contig00002, whole genome shotgun
sequence; 696542396; NZ_JQFJ01000002.1
2208; Sphingobium yanoikuyae strain B1 scaffold1, whole genome shotgun
sequence; 739650776; NZ_KL662193.1
2209; Lysobacter daejeonensis GH1-9 contig23, whole genome shotgun
sequence; 738180952; NZ_AVPU01000014.1
2210; Sphingomonas sp. 35-24ZXX contig11_scaffold4, whole genome
shotgun sequence; 728827031; NZ_JROG01000008.1
2211; Sphingomonas sp. 37zxx contig3_scaffold2, whole genome shotgun
sequence; 728813405; NZ_JROH01000003.1
2212; Actinoalloteichus spitiensis RMV-1378 Contig406, whole genome
shotgun sequence; 483112234; NZ_AGVX02000406.1
2213; Alistipes sp. ZOR0009 L990_140, whole genome shotgun sequence;
835319962; NZ_JTLD01000119.1
2214; Sphingopyxis sp. LC363 contig36, whole genome shotgun sequence;
739702045; NZ_JNFC01000030.1
2215; Sphingopyxis sp. LC81 contig24, whole genome shotgun sequence;
739659070; NZ_JNFD01000017.1
2216; Sphingomonas sp. Ant H11 contig_149, whole genome shotgun
sequence; 730274767; NZ_JSBN01000149.1
2217; Novosphingobium malaysiense strain MUSC 273 Contig11, whole
genome shotgun sequence; 746242072; NZ_JTDI01000011.1
2218; Novosphingobium subterraneum strain DSM 12447 NJ75 contig000028,
whole genome shotgun sequence; 746290581; NZ_JRVC01000028.1
2219; Brevundimonas nasdae strain TPW30 Contig_13, whole genome
shotgun sequence; 746187665; NZ_JWSY01000013.1
2220; Desulfosporosinus youngiae DSM 17734 chromosome, whole genome
shotgun sequence; 374578721; NZ_CM001441.1
2221; Rivularia sp. PCC 7116, complete genome; 427733619; NC_019678.1
2222; Gorillibacterium massiliense strain G5, whole genome shotgun
sequence; 750677319; NZ_CBQR020000171.1
2223; Nonomuraea Candida strain NRRL B-24552 contig8.1, whole genome
shotgun sequence; 759934284; NZ_JOAG01000009.1
2224; Mesorhizobium sp. SOD10, whole genome shotgun sequence;
751285871; NZ_CCNA01000001.1
2225; Citrobacter pasteurii strain CIP 55.13, whole genome shotgun sequence;
749611130; NZ_CDHL01000044.1
2226; Cohnella kolymensis strain VKM B-2846 B2846_22, whole genome
shotgun sequence; 751596254; NZ_JXAL01000022.1
2227; Jeotgalibacillus campisalis strain SF-57 contig00001, whole genome
shotgun sequence; 751586078; NZ_JXRR01000001.1
2228; Clostridium beijerinckii strain NCIMB 14988 genome; 754484184;
NZ_CP010086.1
2229; Novosphingobium sp. P6W scaffold17, whole genome shotgun
sequence; 763097360; NZ_JXZE01000017.1
2230; Sphingomonas hengshuiensis strain WHSC-8, complete genome;
764364074; NZ_CP010836.1
2231; Sphingobium sp. YBL2, complete genome; 765344939;
NZ_CP010954.1
2232; Methanobacterium formicicum genome assembly DSM1535,
chromosome: chrI; 851114167; NZ_LN515531.1
2233; Bacillus cereus genome assembly Bacillus JRS4, contig contig000025,
whole genome shotgun sequence; 924092470; CYHM01000025.1
2234; Frankia sp. DC12 FraDC12DRAFT_scaffold1.1, whole genome
shotgun sequence; 797224947; NZ_KQ031391.1
2235; Clostridium scatologenes strain ATCC 25775, complete genome;
802929558; NZ_CP009933.1
2236; Sphingomonas sp. SRS2 contig40, whole genome shotgun sequence;
806905234; NZ_LARW01000040.1
2237; Jiangella alkaliphila strain KCTC 19222 Scaffold1, whole genome
shotgun sequence; 820820518; NZ_KQ061219.1
2238; Erythrobacter marinus strain HWDM-33 contig3, whole genome
shotgun sequence; 823659049; NZ_LBHU01000003.1
2239; Luteimonas sp. FCS-9 scf7180000000226, whole genome shotgun
sequence; 825314728; NZ_LASZ01000003.1
2240; Sphingomonas parapaucimobilis NBRC 15100 BBPI01000030, whole
genome shotgun sequence; 755134941; NZ_BBPI01000030.1
2241; Sphingobium barthaii strain KK22, whole genome shotgun sequence;
646523831; NZ_BATN01000047.1
2242; Erythrobacter marinus strain HWDM-33 contig3, whole genome
shotgun sequence; 823659049; NZ_LBHU01000003.1
2243; Streptomyces avicenniae strain NRRL B-24776 contig3.1, whole
genome shotgun sequence; 919531973; NZ_JOEK01000003.1
2244; Sphingomonas sp. Y57 scaffold74, whole genome shotgun sequence;
826051019; NZ_LDES01000074.1
2245; Xanthomonas campestris strain CFSAN033089 contig_46, whole
genome shotgun sequence; 920684790; NZ_LHBW01000046.1
2246; Croceicoccus naphthovorans strain PQ-2, complete genome;
836676868; NZ_CP011770.1
2247; Streptomyces caatingaensis strain CMAA 1322 contig09, whole genome
shotgun sequence; 906344341; NZ_LFXA01000009.1
2248; Paenibacillus sp. FJAT-27812 scaffold_0, whole genome shotgun
sequence; 922780240; NZ_LIGH01000001.1
2249; Stenotrophomonas maltophilia strain ISMMS2R, complete genome;
923060045; NZ_CP011306.1
2250; Stenotrophomonas maltophilia strain ISMMS3, complete genome;
923067758; NZ_CP011010.1
2251; Hapalosiphon sp. MRB220 contig_91, whole genome shotgun
sequence; 923076229; NZ_LIRN01000111.1
2252; Stenotrophomonas maltophilia strain B4 contig779, whole genome
shotgun sequence; 924516300; NZ_LDVR01000003.1
2253; Bacillus sp. FJAT-21352 Scaffold1, whole genome shotgun sequence;
924654439; NZ_LIUS01000003.1
2254; Sphingopyxis sp. 113P3, complete genome; 924898949; NZ_CP009452.1
2255; Sphingopyxis sp. 113P3, complete genome; 924898949; NZ_CP009452.1
2256; Streptomyces sp. CFMR 7 strain CFMR-7, complete genome;
924911621; NZ_CP011522.1
2257; Bacillus gobiensis strain FJAT-4402 chromosome; 926268043;
NZ_CP012600.1
2258; Streptomyces sp. XY431 P412contig111.1, whole genome shotgun
sequence; 926317398; NZ_LGDO01000015.1
2259; Streptomyces sp. NRRL F-6491 P443contig15.1, whole genome
shotgun sequence; 925610911; LGEE01000058.1
2260; Streptomyces sp. NRRL B-1140 P439contig15.1, whole genome
shotgun sequence; 926344107; NZ_LGEA01000058.1
2261; Streptomyces sp. NRRL B-1140 P439contig32.1, whole genome
shotgun sequence; 926344331; NZ_LGEA01000105.1
2262; Streptomyces sp. NRRL F-5755 P309contig48.1, whole genome
shotgun sequence; 926371517; NZ_LGCW01000271.1
2263; Streptomyces sp. NRRL F-5755 P309contig7.1, whole genome shotgun
sequence; 926371541; NZ_LGCW01000295.1
2264; Streptomyces sp. WM6378 P402contig63.1, whole genome shotgun
sequence; 926403453; NZ_LGDD01000321.1
2265; Streptomyces sp. WM6378 P402contig63.1, whole genome shotgun
sequence; 926403453; NZ_LGDD01000321.1
2266; Nocardia sp. NRRL S-836 P437contig39.1, whole genome shotgun
sequence; 926412104; NZ_LGDY01000113.1
2267; Paenibacillus sp. A59 contig 353, whole genome shotgun sequence;
927084730; NZ_LITU01000050.1
2268; Paenibacillus sp. A59 contig 416, whole genome shotgun sequence;
927084736; NZ_LITU01000056.1
2269; Streptomyces sp. NRRL S-444 contig322.4, whole genome shotgun
sequence; 797049078; JZWX01001028.1
2270; Altererythrobacter atlanticus strain 26DY36, complete genome;
927872504; NZ_CP011452.2
2271; Streptomyces chattanoogensis strain NRRL ISP-5002 ISP5002contig8.1,
whole genome shotgun sequence; 928897585; NZ_LGKG01000196.1
2272; Streptomyces chattanoogensis strain NRRL ISP-5002 ISP5002contig9.1,
whole genome shotgun sequence; 928897596; NZ_LGKG01000207.1
2273; Ideonella sakaiensis strain 201-F6, whole genome shotgun sequence;
928998724; NZ_BBYR01000007.1
2274; Ideonella sakaiensis strain 201-F6, whole genome shotgun sequence;
928998800; NZ_BBYR01000083.1
2275; Bacillus sp. FJAT-28004 scaffold 2, whole genome shotgun sequence;
929005248; NZ_LGHP01000003.1
2276; Novosphingobium sp. AAP1 AAP1Contigs7, whole genome shotgun
sequence; 930029075; NZ_LJHO01000007.1
2277; Novosphingobium sp. AAP1 AAP1Contigs9, whole genome shotgun
sequence; 930029077; NZ_LJHO01000009.1
2278; Actinobacteria bacterium OK074 ctg60, whole genome shotgun
sequence; 930473294; NZ_LJCV01000275.1
2279; Actinobacteria bacterium OK006 ctg112, whole genome shotgun
sequence; 930490730; NZ_LJCU01000014.1
2280; Frankia sp. R43 contig001, whole genome shotgun sequence;
937182893; NZ_LFCW01000001.1
2281; Sphingopyxis macrogoltabida strain EY-1, complete genome;
937372567; NZ_CP012700.1
2282; Xanthomonas arboricola strain CFTA 44 CITA_44_contig_26, whole
genome shotgun sequence; 937505789; NZ_LJGM01000026.1
2283; Stenotrophomonas acidaminiphila strain ZAC14D2_NAIMI4_2,
complete genome; 938883590; NZ_CP012900.1
2284; Sphingopyxis macrogoltabida strain 203, complete genome; 938956730;
NZ_CP009429.1
2285; Sphingopyxis macrogoltabida strain 203, complete genome; 938956730;
NZ_CP009429.1
2286; Sphingopyxis macrogoltabida strain 203 plasmid, complete sequence;
938956814; NZ_CP009430.1
2287; Cellulosilyticum ruminicola JCM 14822, whole genome shotgun
sequence; 938965628; NZ_BBCG01000065.1
2288; Brevundimonas sp. DS20, complete genome; 938989745; NZ_CP012897.1
2289; Brevundimonas sp. DS20, complete genome; 938989745; NZ_CP012897.1
2290; Paenibacillus sp. GD6, whole genome shotgun sequence; 939708098;
NZ_LN831198.1
2291; Paenibacillus sp. GD6, whole genome shotgun sequence; 939708105;
NZ_LN831205.1
2292; Alicyclobacillus ferrooxydans strain TC-34 contig 22, whole genome
shotgun sequence; 940346731; NZ_LJCO01000107.1
2293; Xanthomonas sp. Mitacek01 contig_17, whole genome shotgun
sequence; 941965142; NZ_LKTT01000002.1
2294; Streptomyces bingchenggensis BCW-1, complete genome; 374982757;
NC_016582.1
2295; Streptomyces pactum strain ACT12 scaffold1, whole genome shotgun
sequence; 943388237; NZ_LIQD01000001.1
2296; Streptomyces flocculus strain NRRL B-2465 B2465_contig_205, whole
genome shotgun sequence; 943674269; NZ_LIQO01000205.1
2297; Streptomyces aurantiacus strain NRRL ISP-5412 ISP-5412_contig_138,
whole genome shotgun sequence; 943881150; NZ_LIPP01000138.1
2298; Streptomyces graminilatus strain NRRL B-59124 B59124_contig_7,
whole genome shotgun sequence; 943897669; NZ_LIQQ01000007.1
2299; Streptomyces alboniger strain NRRL B-1832 B-1832_contig_37, whole
genome shotgun sequence; 943898694; NZ_LIQN01000037.1
2300; Streptomyces alboniger strain NRRL B-1832 B-1832_contig_384,
whole genome shotgun sequence; 943899498; NZ_LIQN01000384.1
2301; Streptomyces kanamyceticus strain NRRL B-2535 B-2535_contig_122,
whole genome shotgun sequence; 943922224; NZ_LIQU01000122.1
2302; Streptomyces luridiscabiei strain NRRL B-24455 B24455_contig_315,
whole genome shotgun sequence; 943927948; NZ_LIQV01000315.1
2303; Streptomyces atriruber strain NRRL B-24165 contig_124, whole
genome shotgun sequence; 943949281; NZ_LIPN01000124.1
2304; Streptomyces hirsutus strain NRRL B-2713 B2713_contig_57, whole
genome shotgun sequence; 944005810; NZ_LIQT01000057.1
2305; Streptomyces aureus strain NRRL B-2808 contig_171, whole genome
shotgun sequence; 944012845; NZ_LIPQ01000171.1
2306; Streptomyces phaeochromogenes strain NRRL B-1248 B-1248_contig_126,
whole genome shotgun sequence; 944029528; NZ_LIQZ01000126.1
2307; Streptomyces torulosus strain NRRL B-3889 B-3889_contig_18, whole
genome shotgun sequence; 944495433; NZ_LIRK01000018.1
2308; Frankia alni str. ACN14A chromosome, complete sequence;
111219505; NC_008278.1
2309; Sphingomonas sp. Leaf20 contig_1, whole genome shotgun sequence;
947349881; NZ_LMKN01000001.1
2310; Paenibacillus sp. Leaf72 contig_6, whole genome shotgun sequence;
947378267; NZ_LMLV01000032.1
2311; Sphingomonas sp. Leaf230 contig_4, whole genome shotgun sequence;
947401208; NZ_LMKW01000010.1
2312; Sanguibacter sp. Leaf3 contig_2, whole genome shotgun sequence;
947472882; NZ_LMRH01000002.1
2313; Aeromicrobium sp. Root344 contig_1, whole genome shotgun
sequence; 947552260; NZ_LMDH01000001.1
2314; Sphingopyxis sp. Root1497 contig_3, whole genome shotgun sequence;
947689975; NZ_LMGF01000003.1
2315; Sphingomonas sp. Root720 contig_7, whole genome shotgun sequence;
947704642; NZ_LMID01000015.1
2316; Sphingomonas sp. Root720 contig_8, whole genome shotgun sequence;
947704650; NZ_LMID01000016.1
2317; Sphingomonas sp. Root710 contig_1, whole genome shotgun sequence;
947721816; NZ_LMIB01000001.1
2318; Mesorhizobium sp. Root172 contig_2, whole genome shotgun sequence;
947919015; NZ_LMHP01000012.1
2319; Mesorhizobium sp. Root102 contig_3, whole genome shotgun sequence;
947937119; NZ_LMCP01000023.1
2320; Paenibacillus sp. Soil750 contig_1, whole genome shotgun sequence;
947966412; NZ_LMSD01000001.1
2321; Paenibacillus sp. Soil522 contig_3, whole genome shotgun sequence;
947983982; NZ_LMRV01000044.1
2322; Paenibacillus sp. Root52 contig_3, whole genome shotgun sequence;
948045460; NZ_LMFO01000023.1
2323; Bacillus sp. Soil768D1 contig_5, whole genome shotgun sequence;
950170460; NZ_LMTA01000046.1
2324; Paenibacillus sp. Root444D2 contig_4, whole genome shotgun
sequence; 950271971; NZ_LMEO01000034.1
2325; Paenibacillus sp. Soil766 contig_32, whole genome shotgun sequence;
950280827; NZ_LMSJ01000026.1
2326; Streptococcus pneumoniae strain type strain: N, whole genome shotgun
sequence; 950938054; NZ_CIHL01000007.1
2327; Streptomyces sp. Root1310 contig_5, whole genome shotgun sequence;
951121600; NZ_LMEQ01000031.1
2328; Bacillus muralis strain DSM 16288 Scaffold4, whole genome shotgun
sequence; 951610263; NZ_LMBV01000004.1
2329; Clostridium butyricum strain KNU-L09 chromosome 1, complete
sequence; 959868240; NZ_CP013252.1
2330; Gorillibacterium sp. SN4, whole genome shotgun sequence; 960412751;
NZ_LN881722.1
2331; Thalassobius activus strain CECT 5114, whole genome shotgun
sequence; 960424655; NZ_CYUE01000025.1
2332; Microbacterium testaceum strain NS283 contig_37, whole genome
shotgun sequence; 969836538; NZ_LDRU01000037.1
2333; Microbacterium testaceum strain NS183 contig_65, whole genome
shotgun sequence; 969919061; NZ_LDRR01000065.1
2334; Sphingopyxis sp. H050 H050_contig000006, whole genome shotgun
sequence; 970555001; NZ_LNRZ01000006.1
2335; Paenibacillus polymyxa strain KF-1 scaffold00001, whole genome
shotgun sequence; 970574347; NZ_LNZF01000001.1
2336; Luteimonas abyssi strain XH031 Scaffold1, whole genome shotgun
sequence; 970579907; NZ_KQ759763.1

TABLE 4
Exemplary Lasso Cyclase
Lasso Cyclase Peptide No: #; Species of Origin; GI#; Accession#

2337; Uncultured marine bacterium 463 clone EBAC080-L32B05 genomic
sequence; 41582259; AY458641.2
2338; Burkholderia pseudomallei strain BEF DP42.Contig323, whole genome
shotgun sequence; 686949962; JPNR01000131.1
2339; Burkholderia thailandensis E264 chromosome I, complete sequence;
83718394; NC_007651.1
2340; Frankia sp. Thr ThrDRAFT_scaffold_48.49, whole genome shotgun
sequence; 602261491; JENI01000049.1
2341; Frankia sp. Thr ThrDRAFT_scaffold_48.49, whole genome shotgun
sequence; 602261491; JENI01000049.1
2342; Sphingopyxis alaskensis RB2256, complete genome; 103485498;
NC_008048.1
2343; Sphingopyxis alaskensis RB2256, complete genome; 103485498;
NC_008048.1
2344; Streptococcus suis strain LS8I, whole genome shotgun sequence;
766595491; NZ_CEHM01000004.1
2345; Streptococcus suis SC84 complete genome, strain SC84; 253750923;
NC_012924.1
2346; Geobacter uraniireducens Rf4, complete genome; 148262085;
NC_009483.1
2347; Geobacter uraniireducens Rf4, complete genome; 148262085;
NC_009483.1
2348; Sphingomonas wittichii RW1, complete genome; 148552929;
NC_009511.1
2349; Caulobacter sp. K31, complete genome; 167643973; NC_010338.1
2350; Phenylobacterium zucineum HLK1, complete genome; 196476886;
CP000747.1
2351; Phenylobacterium zucineum HLK1, complete genome; 196476886;
CP000747.1
2352; Sanguibacter keddieii DSM 10542, complete genome; 269793358;
NC_013521.1
2353; Xylanimonas cellulosilytica DSM 15894, complete genome;
269954810; NC_013530.1
2354; Spirosoma linguale DSM 74, complete genome; 283814236;
CP001769.1
2355; Stackebrandtia nassauensis DSM 44728, complete genome; 291297538;
NC_013947.1
2356; Caulobacter segnis ATCC 21756, complete genome; 295429362;
CP002008.1
2357; Streptomyces bingchenggensis BCW-1, complete genome; 374982757;
NC_016582.1
2358; Streptomyces bingchenggensis BCW-1, complete genome; 374982757;
NC_016582.1
2359; Gallionella capsiferriformans ES-2, complete genome; 302877245;
NC_014394.1
2360; Asticcacaulis excentricus CB 48 chromosome 1, complete sequence;
315497051; NC_014816.1
2361; Burkholderia gladioli BSR3 chromosome 1, complete sequence;
327367349; CP002599.1
2362; Mycobacterium sinense strain JDM601, complete genome; 333988640;
NC_015576.1
2363; Sphingobium chlorophenolicum L-1 chromosome 1, complete
sequence; 334100279; CP002798.1
2364; Streptomyces violaceusniger Tu 4113, complete genome; 345007964;
NC_015957.1
2365; Rhodospirillum rubrum F11, complete genome; 386348020;
NC_017584.1
2366; Actinoplanes sp. SE50/110, complete genome; 386845069;
NC_017803.1
2367; Emticicia oligotrophica DSM 17448, complete genome; 408671769;
NC_018748.1
2368; Tistrella mobilis KA081020-065 plasmid pTM1, complete sequence;
442559580; NC_017957.2
2369; Bacillus thuringiensis MC28, complete genome; 407703236;
NC_018693.1
2370; Nostoc sp. PCC 7107, complete genome; 427705465; NC_019676.1
2371; Synechococcus sp. PCC 6312, complete genome; 427711179;
NC_019680.1
2372; Stanieria cyanosphaera PCC 7437, complete genome; 428267688;
CP003653.1
2373; Desulfocapsa sulfexigens DSM 10523, complete genome; 451945650;
NC_020304.1
2374; Xanthomonas citri pv. mangiferaeindicae LMG 941, whole genome
shotgun sequence; 381169556; NZ_CAHO01000002.1
2375; Streptomyces fulvissimus DSM 40593, complete genome; 488607535;
NC_021177.1
2376; Streptomyces rapamycinicus NRRL 5491 genome; 521353217;
CP006567.1
2377; Gloeobacter kilaueensis JS1, complete genome; 554634310;
NC_022600.1
2378; Kutzneria albida DSM 43870, complete genome; 754862786;
NZ_CP007155.1
2379; Mesorhizobium huakuii 7653R genome; 657121522; CP006581.1
2380; Burkholderia thailandensis E264 chromosome I, complete sequence;
83718394; NC_007651.1
2381; Sphingopyxis fribergensis strain Kp5.2, complete genome; 749188513;
NZ_CP009122.1
2382; Sphingopyxis fribergensis strain Kp5.2, complete genome; 749188513;
NZ_CP009122.1
2383; Streptomyces sp. ZJ306 hydroxylase, deacetylase, and hypothetical
proteins genes, complete cds; ikarugamycin gene cluster, complete sequence;
and GCN5-relaled N-acetyltransferase, hypothetical protein, asparagine
synthase, transcriptional regulator, ABC transporter, hypothetical proteins,
putative membrane transport protein, putative acetyltransferase, cytochrome
P450, putative alpha-glucosidase, phosphoketolase, helix-turn-helix domain-
containing protein, membrane protein, NAD-dependent epimera; 746616581;
KF954512.1
2384; Streptomyces albus strain DSM 41398, complete genome; 749658562;
NZ_CP010519.1
2385; Amycolatopsis lurida NRRL 2430, complete genome; 755908329;
CP007219.1
2386; Streptomyces lydicus A02, complete genome; 822214995; NZ_CP007699J
2387; Streptomyces lydicus A02, complete genome; 822214995; NZ_CP0076994
2388; Streptomyces lydicus A02, complete genome; 822214995; NZ_CP007699.1
2389; Streptomyces xiamenensis strain 318, complete genome; 921170702;
NZ_CP009922.2
2390; Streptomyces xiamenensis strain 318, complete genome; 921170702;
NZ_CP009922.2
2391; Uncultured bacterium clone AZ25P121 genomic sequence; 818476494;
KP274854.1
2392; Streptomyces sp. PBH53 genome; 852460626; CP011799.1
2393; Streptomyces sp. PBH53 genome; 852460626; CP011799.1
2394; Streptomyces sp. PBH53 genome; 852460626; CP011799.1
2395; Sphingopyxis sp. 113P3, complete genome; 924898949; NZ_CP009452.1
2396; Sphingopyxis sp. 113P3, complete genome; 924898949; NZ_CP009452.1
2397; Bifidobacterium longum subsp. infantis strain BT1, complete genome;
927296881; CP010411.1
2398; Nostoc piscinale CENA21 genome; 930349143; CP012036.1
2399; Citromicrobium sp. JL477, complete genome; 932136007; CP011344.1
2400; Sphingopyxis macrogoltabida strain 203, complete genome; 938956730;
NZ_CP009429.1
2401; Sphingopyxis macrogoltabida strain 203 plasmid, complete sequence;
938956814; NZ_CP009430.1
2402; Paenibacillus sp. 320-W, complete genome; 961447255; CP013653.1
2403; Streptomyces avermitilis MA-4680 = NBRC 14893, complete genome;
162960844; NC_003155.4
2404; Streptomyces avermitilis MA-4680 = NBRC 14893, complete genome;
162960844; NC_003155.4
2405; Kitasatospora setae KM-6054 DNA, complete genome; 357386972;
NC_016109.1
2406; Rhodococcus jostii lariatin biosynthetic gene cluster (larA, larB, larC,
larD, larE), complete cds; 380356103dbjAB593691.1; 0
2407; Rubrivivax gelatinosus IL144 DNA, complete genome; 383755859;
NC_017075.1
2408; Pseudomonas sp. Os17 DNA, complete genome;
771839907dbjAP014627.1; 0
2409; Pseudomonas sp. St29 DNA, complete genome;
771846103dbjAP014628.1; 0
2410; Fischerella sp. NIES-3754 DNA, complete genome;
965684975dbjAP017305.1; 0
2411; Magnetospirillum gryphiswaldense MSR-1 v2, complete genome;
568144401; NC_023065.1
2412; Magnetospirillum gryphiswaldense MSR-1 v2, complete genome;
568144401; NC_023065.1
2413; Streptococcus suis SC84 complete genome, strain SC84; 253750923;
NC_012924.1
2414; Salinibacter ruber M8 chromosome, complete genome; 294505815;
NC_014032.1
2415; Enterococcus faecalis ATCC 29212 contig24, whole genome shotgun
sequence; 401673929; ALOD01000024.1
2416; Saccharothrix espanaensis DSM 44229 complete genome; 433601838;
NC_019673.1
2417; Roseburia sp. CAG: 197 WGS project CBBL01000000 data, contig,
whole genome shotgun sequence; 524261006; CBBL010000225.1
2418; Roseburia sp. CAG: 197 WGS project CBBL01000000 data, contig,
whole genome shotgun sequence; 524261006; CBBL010000225.1
2419; Clostridium sp. CAG: 221 WGS project CBDC01000000 data, contig,
whole genome shotgun sequence; 524362382; CBDC010000065.1
2420; Clostridium sp. CAG: 411 WGS project CBIY01000000 data, contig,
whole genome shotgun sequence; 524742306; CBIY010000075.1
2421; Roseburia sp. CAG: 100 WGS project CBKV01000000 data, contig,
whole genome shotgun sequence; 524842500; CBKV010000277.1
2422; Novosphingobium sp. KN65.2 WGS project CCBH000000000 data,
contig SPHv1_Contig_228, whole genome shotgun sequence; 808402906;
CCBH010000144.1
2423; Mesorhizobium plurifarium genome assembly Mesorhizobium
plurifarium ORS1032T genome assembly, contig MPL1032_Contig_21,
whole genome shotgun sequence; 927916006; CCND01000014.1
2424; Kibdelosporangium sp. MJ 126-NF4, whole genome shotgun sequence;
754819815; NZ_CDME01000002.1
2425; Kibdelosporangium sp. MJ126-NF4 genome assembly High
quaKibdelosporangium sp. MJ126-NF4, scaffold BPA 8, whole genome
shotgun sequence; 747653426; CDME01000011.1
2426; Methanobacterium formicicum genome assembly isolate Mb9,
chromosome: I; 952971377; LN734822.1
2427; Streptococcus pneumoniae strain 37, whole genome shotgun sequence;
912648153; NZ_CKHR01000004.1
2428; Streptococcus pneumoniae genome assembly 6631_3#4, scaffold
ERS019570SCcontig000005, whole genome shotgun sequence; 879201007;
CKIK01000005.1
2429; Streptococcus pneumoniae strain type strain: N, whole genome shotgun
sequence; 950938054; NZ_CIHL01000007.1
2430; Streptococcus pneumoniae strain 37, whole genome shotgun sequence;
912648153; NZ_CKHR01000004.1
2431; Klebsiella variicola genome assembly Kv4880, contig
BN1200_Contig_75, whole genome shotgun sequence; 906292938;
CXPB01000073.1
2432; Klebsiella variicola genome assembly KvT29A, contig
BN1200_Contig_98, whole genome shotgun sequence; 906304012;
CXPA01000125.1
2433; Bacillus cereus genome assembly Bacillus JRS4, contig contig000025,
whole genome shotgun sequence; 924092470; CYHM01000025.1
2434; Achromobacter sp. 2789STDY5663426 genome assembly, contig:
ERS372662SCcontig000003, whole genome shotgun sequence; 928675838;
CYTQ01000003.1
2435; Pedobacter sp. BAL39 1103467000492, whole genome shotgun
sequence; 149277373; NZ_ABCM01000005.1
2436; Streptomyces sp. Mg1 supercont1.100, whole genome shotgun
sequence; 254387191; NZ_DS570483.1
2437; Streptomyces sviceus ATCC 29083 chromosome, whole genome
shotgun sequence; 297196766; NZ_CM000951.1
2438; Streptomyces pristinaespiralis ATCC 25486 chromosome, whole
genome shotgun sequence; 297189896; NZ_CM000950.1
2439; Enterococcus faecalis ATCC 4200 supercont1.2, whole genome shotgun
sequence; 239948580; NZ_GG670372.1
2440; Enterococcus faecalis ATCC 29212 contig24, whole genome shotgun
sequence; 401673929; ALOD01000024.1
2441; Streptomyces roseosporus NRRL 15998 supercont3.1 genomic scaffold,
whole genome shotgun sequence; 221717172; DS999644.1
2442; Streptococcus vestibularis F0396 ctg1126932565723, whole genome
shotgun sequence; 311100538; AEKO01000007.1
2443; Streptococcus vestibularis F0396 ctg1126932565723, whole genome
shotgun sequence; 311100538; AEKO01000007.1
2444; Ruminococcus albus 8 contig00035, whole genome shotgun sequence;
325680876; NZ_ADKM02000123.1
2445; Streptomyces sp. W007 contig00293, whole genome shotgun sequence;
365867746; NZ_AGSW01000272.1
2446; Streptomyces sp. W007 contig00241, whole genome shotgun sequence;
365866490; NZ_AGSW01000226.1
2447; Burkholderia pseudomallei 1258a Contig0089, whole genome shotgun
sequence; 418540998; NZ_AHJB01000089.1
2448; Burkholderia pseudomallei 1026a Contig0036, whole genome shotgun
sequence; 385360120; AHJA01000036.1
2449; Rhodanobacter sp. 115 contig437, whole genome shotgun sequence;
389759651; NZ_AJXS01000437.1
2450; Rhodanobacter thiooxydans LCS2 contig057, whole genome shotgun
sequence; 389809081; NZ_AJXW01000057.1
2451; Burkholderia thailandensis MSMB43 Scaffold3, whole genome shotgun
sequence; 424903876; NZ_JH692063.1
2452; Streptomyces auratus AGR0001 Scaffold1, whole genome shotgun
sequence; 398790069; NZ_JH725387.1
2453; Actinomyces naeslundii str. Howell 279 ctg1130888818142, whole
genome shotgun sequence; 399903251; ALJK01000024.1
2454; Enterococcus faecalis ATCC 29212 contig24, whole genome shotgun
sequence; 401673929; ALOD01000024.1
2455; Uncultured bacterium ACD_75C02634, whole genome shotgun
sequence; 406886663; AMFJ01033303.1
2456; Amycolatopsis decaplanina DSM 44594 Contig0055, whole genome
shotgun sequence; 458848256; NZ_AOHO01000055.1
2457; Streptomyces mobaraensis NBRC 13819 = DSM 40847 contig024,
whole genome shotgun sequence; 458977979; NZ_AORZ01000024.1
2458; Burkholderia pseudomallei MSHR1043 seq0003, whole genome
shotgun sequence; 469643984; AOGU01000003.1
2459; Enterococcus faecalis EnGen0363 strain RMC5 acAqY-supercont1.4,
whole genome shotgun sequence; 502232520; NZ_KB944632.1
2460; Enterococcus faecalis EnGen0233 strain UAA1014 acvJV-
supercont1.10.C18, whole genome shotgun sequence; 487281881;
AIZW01000018.1
2461; Pandoraea sp. SD6-2 scaffold29, whole genome shotgun sequence;
505733815; NZ_KB944444.1
2462; Streptomyces aurantiacus JA 4570 Seq28, whole genome shotgun
sequence; 514916412; NZ_AOPZ01000028.1
2463; Streptomyces aurantiacus JA 4570 Seq17, whole genome shotgun
sequence; 514916021; NZ_AOPZ01000017.1
2464; Enterococcus faecalis LA3B-2 Scaffold22, whole genome shotgun
sequence; 522837181; NZ_KE352807.1
2465; Paenibacillus alvei A6-6i-x PAAL66ix_14, whole genome shotgun
sequence; 528200987; ATMS01000061.1
2466; Dehalobacter sp. UNSWDHB Contig_139, whole genome shotgun
sequence; 544905305; NZ_AUUR01000139.1
2467; Actinobaculum sp. oral taxon 183 str. F0552 Scaffold15, whole genome
shotgun sequence; 545327527; NZ_KE951412.1
2468; Actinobaculum sp. oral taxon 183 str. F0552 Scaffold1, whole genome
shotgun sequence; 545327174; NZ_KE951406.1
2469; Propionibacterium acidifaciens F0233 ctg1127964738299, whole
genome shotgun sequence; 544249812; ACVN02000045.1
2470; Rubidibacter lacunae KORDI 51-2 KR51_contig00121, whole genome
shotgun sequence; 550281965; NZ_ASSJ01000070.1
2471; Rothia aeria F0184 R_aeriaHMPREF0742-1.0_Cont136.4, whole
genome shotgun sequence; 551695014; AXZG01000035.1
2472; Candidatus Halobonum tyrrellensis G22 contig00002, whole genome
shotgun sequence; 557371823; NZ_ASGZ01000002.1
2473; Streptomyces niveus NCIMB 11891 chromosome, whole genome
shotgun sequence; 566146291; NZ_CM002280.1
2474; Blastomonas sp. CACIA14H2 contig00049, whole genome shotgun
sequence; 563282524; AYSC01000019.1
2475; Frankia sp. CcI6 CcI6DRAFT_scaffold_51.52, whole genome shotgun
sequence; 563312125; AYTZ01000052.1
2476; Frankia sp. CcI6 CcI6DRAFT_scaffold_16.17, whole genome shotgun
sequence; 564016690; NZ_AYTZ01000017.1
2477; Clostridium butyricum DORA_1 Q607_CBUC00058, whole genome
shotgun sequence; 566226100; AZLX01000058.1
2478; Streptococcus sp. DORA_10 Q617_SPSC00257, whole genome
shotgun sequence; 566231608; AZMH01000257.1
2479; Candidatus Entotheonella factor TSY1_contig00913, whole genome
shotgun sequence; 575408569; AZHW01000959.1
2480; Candidatus Entotheonella gemina TSY2_contig00559, whole genome
shotgun sequence; 575423213; AZHX01000559.1
2481; Streptomyces roseosporus NRRL 11379 supercont4.1, whole genome
shotgun sequence; 588273405; NZ_ABYX02000001.1
2482; Frankia sp. Thr ThrDRAFT_scaffold_48.49, whole genome shotgun
sequence; 602261491; JENI01000049.1
2483; Frankia sp. CcI6 CcI6DRAFT_scaffold_51.52, whole genome shotgun
sequence; 563312125; AYTZ01000052.1
2484; Frankia sp. Thr ThrDRAFT_scaffold_28.29, whole genome shotgun
sequence; 602262270; JENI01000029.1
2485; Novosphingobium resinovorum strain KF1 contig000008, whole
genome shotgun sequence; 738615271; NZ_JFYZ01000008.1
2486; Novosphingobium resinovorum strain KF1 contig000008, whole
genome shotgun sequence; 738615271; NZ_JFYZ01000008.1
2487; Brevundimonas abyssalis TAR-001 DNA, contig: BAB005, whole
genome shotgun sequence; 543418148dbjBATC01000005.1; 0
2488; Bacillus akibai JCM 9157, whole genome shotgun sequence;
737696658; NZ_BAUV01000025.1
2489; Bacillus akibai JCM 9157, whole genome shotgun sequence;
737696658; NZ_BAUV01000025.1
2490; Bacillus boroniphilus JCM 21738 DNA, contig: contig_6, whole
genome shotgun sequence; 571146044dbjBAUW01000006.1; 0
2491; Bacillus sp. 17376 scaffold00002, whole genome shotgun sequence;
560433869; NZ_KI547189.1
2492; Gracilibacillus boraciitolerans JCM 21714 DNA, contig: contig_30,
whole genome shotgun sequence; 575082509dbjBAVS01000030.1; 0
2493; Gracilibacillus boraciitolerans JCM 21714 DNA, contig: contig_30,
whole genome shotgun sequence; 575082509dbjBAVS01000030.1; 0
2494; Bacterium endosymbiont of Mortierella elongata FMR23-6, whole
genome shotgun sequence; 779889750; NZ_DF850521.1
2495; Sphingopyxis sp. C-1 DNA, contig: contig_1, whole genome shotgun
sequence; 834156795dbjBBR001000001.1; 0
2496; Sphingopyxis sp. C-1 DNA, contig: contig_1, whole genome shotgun
sequence; 834156795dbjBBR001000001.1; 0
2497; Sphingopyxis sp. C-1 DNA, contig: contig_1, whole genome shotgun
sequence; 834156795dbjBBR001000001.1; 0
2498; Ideonella sakaiensis strain 201-F6, whole genome shotgun sequence;
928998724; NZ_BBYR01000007.1
2499; Brevundimonas sp. EAKA contig5, whole genome shotgun sequence;
737322991; NZ_JMQR01000005.1
2500; Streptomyces griseorubens strain JSD-1 scaffold1, whole genome
shotgun sequence; 739792456; NZ_KL503830.1
2501; Frankia sp. Thr ThrDRAFT_scaffold_28.29, whole genome shotgun
sequence; 602262270; JENI01000029.1
2502; Frankia sp. Allo2 ALLO2DRAFT_scaffold_25.26, whole genome
shotgun sequence; 737764929; NZ_JPHT01000026.1
2503; Frankia sp. CcI6 CcI6DRAFT_scaffold_16.17, whole genome shotgun
sequence; 564016690; NZ_AYTZ01000017.1
2504; Bifidobacterium reuteri DSM 23975 Contig04, whole genome shotgun
sequence; 672991374; JGZK01000004.1
2505; Streptomyces sp. JS01 contig2, whole genome shotgun sequence;
695871554; NZ_JPWW01000002.1
2506; Sphingopyxis sp. LC81 contig28, whole genome shotgun sequence;
686470905; JNFD01000021.1
2507; Sphingopyxis sp. LC81 contig24, whole genome shotgun sequence;
739659070; NZ_JNFD01000017.1
2508; Sphingopyxis sp. LC363 contig36, whole genome shotgun sequence;
739702045; NZ_JNFC01000030.1
2509; Burkholderia pseudomallei strain BEF DP42.Contig323, whole genome
shotgun sequence; 686949962; JPNR01000131.1
2510; Xanthomonas cannabis pv. phaseoli strain Nyagatare scf_52938_7,
whole genome shotgun sequence; 835885587; NZ_KN265462.1
2511; Burkholderia pseudomallei MSHR1000 scaffold1, whole genome
shotgun sequence; 740963677; NZ_KN323065.1
2512; Burkholderia pseudomallei MSHR435 Y033.Contig530, whole genome
shotgun sequence; 715120018; JRFP01000024.1
2513; Candidatus Thiomargarita nelsonii isolate Hydrate Ridge contig_1164,
whole genome shotgun sequence; 723288710; JSZA01001164.1
2514; Paenibacillus sp. P1XP2 CM49_contig000046, whole genome shotgun
sequence; 727078508; JRNV01000046.1
2515; Novosphingobium sp. P6W scaffold9, whole genome shotgun sequence;
763095630; NZ_JXZE01000009.1
2516; Streptomyces griseus strain S4-7 contig113, whole genome shotgun
sequence; 764464761; NZ_JYBE01000113.1
2517; Lechevalieria aerocolonigenes strain NRRL B-16140 contig11.3, whole
genome shotgun sequence; 772744565; NZ_JYJG01000059.1
2518; Desulfobulbaceae bacterium BRH_c16a BRHa_1001515, whole
genome shotgun sequence; 780791108; LADS01000058.1
2519; Peptococcaceae bacterium BRH_c4b BRHa_1001357, whole genome
shotgun sequence; 780813318; LADO01000010.1
2520; Peptococcaceae bacterium BRH_c4b BRHa_1001357, whole genome
shotgun sequence; 780813318; LADO01000010.1
2521; Hyphomonadaceae bacterium BRH_c29 BRHa_1005676, whole
genome shotgun sequence; 780821511; LADW01000068.1
2522; Hyphomonas sp. BRH_c22 BRHa_1001979, whole genome shotgun
sequence; 780834515; LADU01000087.1
2523; Streptomyces rubellomurinus subsp. indigofems strain ATCC 31304
contig-55, whole genome shotgun sequence; 783374270; NZ_JZKG01000056.1
2524; Streptomyces sp. NRRL S-444 contig322.4, whole genome shotgun
sequence; 797049078; JZWX01001028.1
2525; Streptomyces sp. NRRL B-1568 contig-76, whole genome shotgun
sequence; 799161588; NZ_JZWZ01000076.1
2526; Candidate division TM6 bacterium GW2011_GWF2_36_131
US03_C0013, whole genome shotgun sequence; 818310996;
LBRK01000013.1
2527; Sphingobium czechense LL01 25410_1, whole genome shotgun
sequence; 861972513; JACT01000001.1
2528; Streptomyces caatingaensis strain CMAA 1322 contig02, whole genome
shotgun sequence; 906344334; NZ_LFXA01000002.1
2529; Erythrobacter citreus LAMA 915 Contig13, whole genome shotgun
sequence; 914607448; NZ_JYNE01000028.1
2530; Paenibacillus polymyxa strain YUPP-8 scaffold32, whole genome
shotgun sequence; 924434005; LIYK01000027.1
2531; Burkholderia mallei GB8 horse 4 contig_394, whole genome shotgun
sequence; 67639376; NZ_AAHO01000116.1
2532; Streptomyces rimosus subsp. rimosus strain NRRL WC-3909
P217contig95.1, whole genome shotgun sequence; 925286515;
LGC001000284.1
2533; Streptomyces rimosus subsp. rimosus strain NRRL WC-3909
P217contig56.1, whole genome shotgun sequence; 925291008;
LGCO01000241.1
2534; Streptomyces rimosus subsp. rimosus strain NRRL WC-3869
P248contig50.1, whole genome shotgun sequence; 925315417;
LGCQ01000244.1
2535; Streptomyces rimosus subsp. rimosus strain NRRL WC-3869
P248contig20.1, whole genome shotgun sequence; 925322461;
LGCQ01000113.1
2536; Streptomyces rimosus subsp. rimosus strain NRRL WC-3898
P259contig86.1, whole genome shotgun sequence; 927279089;
NZ_LGCU01000353.1
2537; Streptomyces rimosus subsp. pseudoverticillatus strain NRRL WC-3896
P270contig8.1, whole genome shotgun sequence; 927292684;
NZ_LGCV01000415.1
2538; Streptomyces rimosus subsp. pseudoverticillatus strain NRRL WC-3896
P270contig51.1, whole genome shotgun sequence; 927292651;
NZ_LGCV01000382.1
2539; Streptomyces sp. NRRL F-5755 P309contig7.1, whole genome shotgun
sequence; 926371541; NZ_LGCW01000295.1
2540; Streptomyces sp. NRRL F-5755 P309contig50.1, whole genome
shotgun sequence; 926371520; NZ_LGCW01000274.1
2541; Streptomyces sp. NRRL F-5755 P309contig48.1, whole genome
shotgun sequence; 926371517; NZ_LGCW01000271.1
2542; Streptomyces sp. NRRL F-6492 P446contig3.1, whole genome shotgun
sequence; 926315769; NZ_LGEG01000211.1
2543; Streptomyces sp. XY332 P409contig34.1, whole genome shotgun
sequence; 927093145; NZ_LGHN01000166.1
2544; Novosphingobium sp. ST904 contig_104, whole genome shotgun
sequence; 935540718; NZ_LGJH01000063.1
2545; Actinobacteria bacterium OK006 ctg96, whole genome shotgun
sequence; 930491003; NZ_LJCU01000287.1
2546; Actinobacteria bacterium OK074 ctg60, whole genome shotgun
sequence; 930473294; NZ_LJCV01000275.1
2547; Betaproteobacteria bacterium SG8_39 WOR_8-12_2589, whole
genome shotgun sequence; 931421682; LJTQ01000030.1
2548; Candidate division BRC1 bacterium SM23_51WORSMTZ 10094,
whole genome shotgun sequence; 931536013; LJUL01000022.1
2549; Bacillus vietnamensis strain UCD-SED5 scaffold_15, whole genome
shotgun sequence; 933903534; LIXZ01000017.1
2550; Xanthomonas arboricola strain CITA 44 CITA_44_contig 26, whole
genome shotgun sequence; 937505789; NZ_LJGM01000026.1
2551; Xanthomonas sp. Mitacek01 contig 17, whole genome shotgun
sequence; 941965142; NZ_LKTT01000002.1
2552; Erythrobacteraceae bacterium HL-111 ITZY_scaf_51, whole genome
shotgun sequence; 938259025; LJSW01000006.1
2553; Halomonas sp. HL-93 ITZY_scaf_415, whole genome shotgun
sequence; 938285459; LJST01000237.1
2554; Paenibacillus sp. Soil724D2 contig 11, whole genome shotgun
sequence; 946400391; LMRY01000003.1
2555; Leucobacter sp. G161 contig50, whole genome shotgun sequence;
970293907; LOHP01000076.1
2556; Streptomyces silvensis strain ATCC 53525 53525_Assembly_Contig_22,
whole genome shotgun sequence; 970361514; LOCL01000028.1
2557; Streptococcus pneumoniae 2071004 gspj3.contig.3, whole genome
shotgun sequence; 421236283; NZ_ALBJ01000004.1
2558; Streptococcus pneumoniae 70585, complete genome; 225857809;
NC_012468.1
2559; Bacillus cereus R309803 chromosome, whole genome shotgun
sequence; 238801472; NZ_CM000720.1
2560; Bacillus cereus AH1271 chromosome, whole genome shotgun
sequence; 238801491; NZ_CM000739.1
2561; Bacillus thuringiensis serovar andalousiensis BGSC 4AW1 chromosome,
whole genome shotgun sequence; 238801506; NZ_CM000754.1
2562; Bacillus cereus VD115 supercont1.1, whole genome shotgun sequence;
423614674; NZ_JH792165.1
2563; Bacillus cereus Rock4-18 chromosome, whole genome shotgun
sequence; 238801487; NZ_CM000735.1
2564; Bacillus cereus Rock1-3 chromosome, whole genome shotgun sequence;
238801480; NZ_CM000728.1
2565; Bacillus cereus Rock3-29 chromosome, whole genome shotgun
sequence; 238801483; NZ_CM000731.1
2566; Bacillus cereus VD148 supercont1.1, whole genome shotgun sequence;
423621402; NZ_JH792156.1
2567; Bacillus thuringiensis MC28, complete genome; 407703236; NC_018693.1
2568; Bacillus cereus BAG5X2-1 supercont1.1, whole genome shotgun
sequence; 423456860; NZ_JH791975.1
2569; Bacillus cereus BAG3X2-1 supercont1.1, whole genome shotgun
sequence; 423416528; NZ_JH791923.1
2570; Bacillus cereus BAG1X1-3 supercont1.1, whole genome shotgun
sequence; 423388152; NZ_JH792182.1
2571; Escherichia coli KTE150 acwoI-supercont1.4, whole genome shotgun
sequence; 433109554; NZ_ANYF01000004.1
2572; Bacillus cereus NVH0597-99 gcontig2_1106483384196, whole genome
shotgun sequence; 196038187; NZ_ABDK02000003.1
2573; Bacillus cereus AH621 chromosome, whole genome shotgun sequence;
238801471; NZ_CM000719.1
2574; Bacillus cereus AH603 chromosome, whole genome shotgun sequence;
238801489; NZ_CM000737.1
2575; Bacillus cereus VD142 actaa-supercont2.2, whole genome shotgun
sequence; 514340871; NZ_KE150045.1
2576; Bacillus cereus BAG6O-2 supercont1.1, whole genome shotgun
sequence; 423468694; NZ_JH804628.1
2577; Bacillus cereus BtB2-4 supercont1.1, whole genome shotgun sequence;
423485377; NZ_JH804642.1
2578; Bacillus cereus HuA2-1 supercont1.1, whole genome shotgun sequence;
423508503; NZ_JH804672.1
2579; Bacillus cereus HuA4-10 supercont1.1, whole genome shotgun
sequence; 423520617; NZ_JH792148.1
2580; Bacillus cereus MC67 supercont1.2, whole genome shotgun sequence;
423557538; NZ_JH792114.1
2581; Bacillus cereus VD078 supercont1.1, whole genome shotgun sequence;
423597198; NZ_JH792251.1
2582; Bacillus cereus VD107 supercont1.1, whole genome shotgun sequence;
423609285; NZ_JH792232.1
2583; Bacillus mycoides DSM 2048 chromosome, whole genome shotgun
sequence; 238801494; NZ_CM000742.1
2584; Bacillus cereus VDM034 supercont1.1, whole genome shotgun
sequence; 423666303; NZ_JH791809.1
2585; Bacillus cereus BAG5X1-1 supercont1.1, whole genome shotgun
sequence; 423451256; NZ_JH791996.1
2586; Enterococcus faecalis ATCC 29212 contig24, whole genome shotgun
sequence; 401673929; ALOD01000024.1
2587; Enterococcus faecalis TX1341 Scfld578, whole genome shotgun
sequence; 422736691; NZ_GL457197.1
2588; Clostridium butyricum 60E.3 actYk-supercont1.1, whole genome
shotgun sequence; 488644557; NZ_KB851128.1
2589; Rhodobacter sphaeroides WS8N chromosome chrI, whole genome
shotgun sequence; 332561612; NZ_CM001161.1
2590; Microcystis aeruginosa PCC 9807, whole genome shotgun sequence;
425454132; NZ_HE973326.1
2591; Brevundimonas diminuta ATCC 11568 BDIM_scaffold00005, whole
genome shotgun sequence; 329889017; NZ_GL883086.1
2592; Brevundimonas diminuta 470-4 Scfld7, whole genome shotgun
sequence; 444405902; NZ_KB291784.1
2593; Bacillus mycoides Rock1-4 chromosome, whole genome shotgun
sequence; 238801495; NZ_CM000743.1
2594; Clostridium butyricum 5521 gcontig_1106103650482, whole genome
shotgun sequence; 182420360; NZ_ABDT01000120.2
2595; Xanthomonas citri pv. mangiferaeindicae LMG 941, whole genome
shotgun sequence; 381169556; NZ_CAHO01000002.1
2596; Xanthomonas citri pv. mangiferaeindicae LMG 941, whole genome
shotgun sequence; 381171950; NZ_CAHO01000029.1
2597; Methylosinus trichosporium OB3b MettrDRAFT_Contig106_C, whole
genome shotgun sequence; 639846426; NZ_ADVE02000001.1
2598; Streptomyces clavuligerus ATCC 27064 supercont1.55, whole genome
shotgun sequence; 254392242; NZ_DS570678.1
2599; Streptomyces rimosus subsp. rimosus strain NRRL WC-3909 P217contig95.1,
whole genome shotgun sequence; 925286515; LGCO01000284.1
2600; Streptomyces rimosus subsp. rimosus strain NRRL WC-3909 P217contig56.1,
whole genome shotgun sequence; 925291008; EGCO01000241.1
2601; Streptomyces viridochromogenes DSM 40736 supercont1.1, whole
genome shotgun sequence; 224581107; NZ_GG657757.1
2602; Streptomyces viridochromogenes DSM 40736 supercont1.1, whole
genome shotgun sequence; 224581107; NZ_GG657757.1
2603; Streptomyces viridochromogenes Tue57 Seq127, whole genome
shotgun sequence; 443625867; NZ_AMLP01000127.1
2604; Methanobacterium formicicum DSM 3637 Contig04, whole genome
shotgun sequence; 408381849; NZ_AMPO01000004.1
2605; Burkholderia pseudomallei MSHR435 Y033.Contig530, whole genome
shotgun sequence; 715120018; JRFP01000024.1
2606; Burkholderia mallei GB8 horse 4 contig_394, whole genome shotgun
sequence; 67639376; NZ_AAHO01000116.1
2607; Sphingobium yanoikuyae ATCC 51230 supercont1.1, whole genome
shotgun sequence; 427407324; NZ_JH992904.1
2608; Sphingobium yanoikuyae ATCC 51230 supercont1.1, whole genome
shotgun sequence; 427407324; NZ_JH992904.1
2609; Sphingobium yanoikuyae ATCC 51230 supercont1.1, whole genome
shotgun sequence; 427407324; NZ_JH992904.1
2610; Burkholderia pseudomallei MSHR1043 seq0003, whole genome
shotgun sequence; 469643984; AOGU01000003.1
2611; Burkholderia pseudomallei strain BEF DP42.Contig323, whole genome
shotgun sequence; 686949962; JPNR01000131.1
2612; Burkholderia pseudomallei S13 scf_1041068450778, whole genome
shotgun sequence; 254197184; NZ_CH899773.1
2613; Burkholderia pseudomallei 1026a Contig0036, whole genome shotgun
sequence; 385360120; AHJA01000036.1
2614; Burkholderia pseudomallei 305 g_contig_BUA.Contig1097, whole
genome shotgun sequence; 134282186; NZ_AAYX01000011.1
2615; Burkholderia pseudomallei 576 BUC.Contig184, whole genome
shotgun sequence; 217421258; NZ_ACCE01000004.1
2616; [Eubacterium] cellulosolvens 6 chromosome, whole genome shotgun
sequence; 389575461; NZ_CM001487.1
2617; Amycolatopsis azurea DSM 43854 contig60, whole genome shotgun
sequence; 451338568; NZ_ANMG01000060.1
2618; Xanthomonas axonopodis pv. malvacearum str. GSPB1386
1386_Scaffold6, whole genome shotgun sequence; 418516056;
NZ_AHIB01000006.1
2619; Xanthomonas citri pv. punicae str. LMG 859, whole genome shotgun
sequence; 390991205; NZ_CAGJ01000031.1
2620; Bacillus pseudomycoides DSM 12442 chromosome, whole genome
shotgun sequence; 238801497; NZ_CM000745.1
2621; Mesorhizobium amorphae CCNWGS0123 contig00204, whole genome
shotgun sequence; 357028583; NZ_AGSN01000187.1
2622; Xanthomonas gardneri ATCC 19865 XANTHO7DRAF_Contig52,
whole genome shotgun sequence; 325923334; NZ_AEQX01000392.1
2623; Xenococcus sp. PCC 7305 scaffold_00124, whole genome shotgun
sequence; 443325429; NZ_ALVZ01000124.1
2624; Leptolyngbya sp. PCC 7375 Lepto7375DRAFT_LPA.5, whole genome
shotgun sequence; 427415532; NZ_JH993797.1
2625; Streptomyces auratus AGR0001 Scaffold1, whole genome shotgun
sequence; 398790069; NZ_JH725387.1
2626; Paenibacillus dendritiformis C454 PDENDC1000064, whole genome
shotgun sequence; 374605177; NZ_AHKH01000064.1
2627; Halosimplex carlsbadense 2-9-1 contig_4, whole genome shotgun
sequence; 448406329; NZ_AOIU01000004.1
2628; Rothia aeria F0474 contig00003, whole genome shotgun sequence;
383809261; NZ_AJJQ01000036.1
2629; Paenibacillus lactis 154 ctg179, whole genome shotgun sequence;
354585485; NZ_AGIP01000020.1
2630; Fictibacillus macauensis ZFHKF-1 Contig20, whole genome shotgun
sequence; 392955666; NZ_AKKV01000020.1
2631; Marine gamma proteobacterium HTCC2148 scf_1106774214169,
whole genome shotgun sequence; 254480798; NZ_DS999224.1
2632; Paenibacillus sp. Aloe-11 GW8_15, whole genome shotgun sequence;
375307420; NZ_JH601049.1
2633; Rhodanobacter denitrificans strain 116-2 contig032, whole genome
shotgun sequence; 389798210; NZ_AJXV01000032.1
2634; Frankia saprophytica strain CN3 FrCN3DRAFT_FCB.2, whole genome
shotgun sequence; 652876473; NZ_KI912267.1
2635; Caulobacter sp. AP07 PMI01_contig_53.53, whole genome shotgun
sequence; 399069941; NZ_AKKF01000033.1
2636; Novosphingobium sp. AP12 PMI02_contig_78.78, whole genome
shotgun sequence; 399058618; NZ_AKKE01000021.1
2637; Sphingobium sp. AP49 PMI04_contig490.490, whole genome shotgun
sequence; 398386476; NZ_AJVL01000086.1
2638; Desulfosporosinus youngiae DSM 17734 chromosome, whole genome
shotgun sequence; 374578721; NZ_CM001441.1
2639; Moorea producens 3L scf52054, whole genome shotgun sequence;
332710503; NZ_GL890955.1
2640; Pedobacter sp. BAL39 1103467000500, whole genome shotgun
sequence; 149277003; NZ_ABCM01000004.1
2641; Sulfurovum sp. AR contig00449, whole genome shotgun sequence;
386284588; NZ_AJLE01000006.1
2642; Mucilaginibacter paludis DSM 18603 chromosome, whole genome
shotgun sequence; 373951708; NZ_CM001403.1
2643; Mucilaginibacter paludis DSM 18603 chromosome, whole genome
shotgun sequence; 373951708; NZ_CM001403.1
2644; Magnetospirillum caucaseum strain SO-1 contig00006, whole genome
shotgun sequence; 458904467; NZ_AONQ01000006.1
2645; Sphingomonas sp. LH128 Contig3, whole genome shotgun sequence;
402821166; NZ_ALVC01000003.1
2646; Sphingomonas sp. LH128 Contig8, whole genome shotgun sequence;
402821307; NZ_ALVC01000008.1
2647; Novosphingobium sp. Rr 2-17 contig98, whole genome shotgun
sequence; 393773868; NZ_AKFJ01000097.1
2648; Streptomyces sp. AA4 supercont1.3, whole genome shotgun sequence;
224581098; NZ_GG657748.1
2649; Moorea producens 3L scf52052, whole genome shotgun sequence;
332710285; NZ_GL890953.1
2650; Cecembia lonarensis LW9 contig000133, whole genome shotgun
sequence; 406663945; NZ_AMGM01000133.1
2651; Actinomyces sp. oral taxon 848 str. F0332 Scfld0, whole genome
shotgun sequence; 260447107; NZ_GG703879.1
2652; Actinomyces sp. oral taxon 848 str. F0332 Scfld0, whole genome
shotgun sequence; 260447107; NZ_GG703879.1
2653; Streptomyces ipomoeae 91-03 gcontig_1108499710267, whole genome
shotgun sequence; 429195484; NZ_AEJC01000118.1
2654; Frankia sp. QA3 chromosome, whole genome shotgun sequence;
392941286; NZ_CM001489.1
2655; Fischerella sp. JSC-11 ctg112, whole genome shotgun sequence;
354566316; NZ_AGIZ01000005.1
2656; Rhodobacter sp. AKP1 contigl9, whole genome shotgun sequence;
429208285; NZ_ANFS01000019.1
2657; Sphingomonas sp. SKA58 scf_1100007010440, whole genome shotgun
sequence; 211594417; NZ_CH959308.1
2658; Rubrivivax benzoatilyticus JA2 = ATCC BAA-35 strain JA2
contig_155, whole genome shotgun sequence; 332527785;
NZ_AEWG01000155.1
2659; Streptomyces clavuligerus ATCC 27064 plasmid pSCL3, whole
genome shotgun sequence; 326336949; NZ_CM001018.1
2660; Streptomyces chartreusis NRRL 12338 12338_Doro1_scaffold19,
whole genome shotgun sequence; 381200190; NZ_JH164855.1
2661; Candidatus Odyssella thessalonicensis L13 HMO_scaffold00016, whole
genome shotgun sequence; 343957487; NZ_AEWF01000005.1
2662; Candidatus Odyssella thessalonicensis L13 HMO_scaffold00016, whole
genome shotgun sequence; 343957487; NZ_AEWF01000005.1
2663; Sphingobium yanoikuyae XLDN2-5 contig000022, whole genome
shotgun sequence; 378759068; NZ_AFXE01000022.1
2664; Sphingobium yanoikuyae XLDN2-5 contig000029, whole genome
shotgun sequence; 378759075; NZ_AFXE01000029.1
2665; Paenibacillus peoriae KCTC 3763 contig9, whole genome shotgun
sequence; 389822526; NZ_AGFX01000048.1
2666; Citromicrobium sp. JLT1363 contig00009, whole genome shotgun
sequence; 341575924; NZ_AEUE01000009.1
2667; [Pseudomonas] geniculata N1 contig35, whole genome shotgun
sequence; 921165904; NZ_AJLO02000014.1
2668; Pseudomonas extremaustralis 14-3 substr. 14-3b strain 14-3
contig00001, whole genome shotgun sequence; 394743069;
NZ_AHIP01000001.1
2669; Streptomyces sp. S4, whole genome shotgun sequence; 358468594;
NZ_FR873693.1
2670; Streptomyces sp. S4, whole genome shotgun sequence; 358468601;
NZ_FR873700.1
2671; Bacillus timonensis strain MM10403188, whole genome shotgun
sequence; 403048279; NZ_HE610988.1
2672; Lunatimonas lonarensis strain AK24 S14_contig_18, whole genome
shotgun sequence; 499123840; NZ_AQHR01000021.1
2673; Mesorhizobium loti MAFF303099 DNA, complete genome; 57165207;
NC_002678.2
2674; Legionella pneumophila subsp. pneumophila ATCC 43290, complete
genome; 378775961; NC_016811.1
2675; Xanthomonas axonopodis pv. citri str. 306, complete genome;
21240774; NC_003919.1
2676; Thermobifida fusca YX, complete genome; 72160406; NC_007333.1
2677; Rhodobacter sphaeroides 2.4.1 chromosome 1, whole genome shotgun
sequence; 482849861; NZ_AKBU01000001.1
2678; Rhodospirillum rubrum F11, complete genome; 386348020; NC_017584.1
2679; Rhodospirillum rubrum F11, complete genome; 386348020; NC_017584.1
2680; Rhodospirillum rubrum F11, complete genome; 386348020; NC_017584.1
2681; Hahella chejuensis KCTC 2396, complete genome; 83642913; NC_007645.1
2682; Frankia sp. Thr ThrDRAFT_scaffold_48.49, whole genome shotgun
sequence; 602261491; JENI01000049.1
2683; Frankia sp. Thr ThrDRAFT_scaffold_28.29, whole genome shotgun
sequence; 602262270; JENI01000029.1
2684; Novosphingobium aromaticivorans DSM 12444, complete genome;
87198026; NC_007794.1
2685; Roseobacter denitrificans OCh 114, complete genome; 110677421;
NC_008209.1
2686; Frankia alni str. ACN14A chromosome, complete sequence;
111219505; NC_008278.1
2687; Pelobacter propionicus DSM 2379, complete genome; 118578449;
NC_008609.1
2688; Psychromonas ingrahamii 37, complete genome; 119943794;
NC_008709.1
2689; Rhodobacter sphaeroides ATCC 17029 chromosome 1, complete
sequence; 126460778; NC_009049.1
2690; Burkholderia pseudomallei 668 chromosome I, complete sequence;
126438353; NC_009074.1
2691; Rhodobacter sphaeroides ATCC 17025, complete genome; 146276058;
NC_009428.1
2692; Geobacter uraniireducens Rf4, complete genome; 148262085;
NC_009483.1
2693; Sulfurovum sp. NBC37-1 genomic DNA, complete genome;
152991597; NC_009663.1
2694; Acaryochloris marina MBIC11017, complete genome; 158333233;
NC_009925.1
2695; Bacillus weihenstephanensis KBAB4, complete genome; 163938013;
NC_010184.1
2696; Caulobacter sp. K31 plasmid pCAUL01, complete sequence;
167621728; NC_010335.1
2697; Caulobacter sp. K31, complete genome; 167643973; NC_010338.1
2698; Candidatus Amoebophilus asiaticus 5a2, complete genome; 189501470;
NC_010830.1
2699; Stenotrophomonas maltophilia R551-3, complete genome; 194363778;
NC_011071.1
2700; Bifidobacterium longum subsp. infantis ATCC 15697, complete
genome; 213690928; NC_011593.1
2701; Cyanothece sp. PCC 7425, complete genome; 220905643; NC_011884.1
2702; Chitinophaga pinensis DSM 2588, complete genome; 256419057;
NC_013132.1
2703; Haliangium ochraceum DSM 14365, complete genome; 262193326;
NC_013440.1
2704; Rhodothermus marinus DSM 4252, complete genome; 268315578;
NC_013501.1
2705; Thermobaculum terrenum ATCC BAA-798 chromosome 1, complete
sequence; 269925123; NC_013525.1
2706; Thermobaculum terrenum ATCC BAA-798 chromosome 2, complete
sequence; 269838913; NC_013526.1
2707; Thermobaculum terrenum ATCC BAA-798 chromosome 2, complete
sequence; 269838913; NC_013526.1
2708; Sphingobium japonicum UT26S DNA, chromosome 1, complete
genome; 294009986; NC_014006.1
2709; Sphingobium japonicum UT26S plasmid pCHQ1 DNA, complete
genome; 294023656; NC_014007.1
2710; Salinibacter ruber M8 chromosome, complete genome; 294505815;
NC_014032.1
2711; Salinibacter ruber M8 chromosome, complete genome; 294505815;
NC_014032.1
2712; Legionella pneumophila 2300/99 Alcoy, complete genome; 296105497;
NC_014125.1
2713; Nocardiopsis dassonvillei subsp. dassonvillei DSM 43111 chromosome
1, complete sequence; 297558985; NC_014210.1
2714; Amycolatopsis mediterranei S699, complete genome; 384145136;
NC_017186.1
2715; Butyrivibrio proteoclasticus B316 chromosome 1, complete sequence;
302669374; NC_014387.1
2716; Paenibacillus polymyxa E681, complete genome; 864439741;
NC_014483.2
2717; Paenibacillus polymyxa M1 main chromosome, complete genome;
386038690; NC_017542.1
2718; Leadbetterella byssophila DSM 17132, complete genome; 312128809;
NC_014655.1
2719; Frankia inefficax, complete genome; 312193897; NC_014666.1
2720; Frankia inefficax, complete genome; 312193897; NC_014666.1
2721; Burkholderia rhizoxinica HKI 454, complete genome; 312794749;
NC_014722.1
2722; Burkholderia rhizoxinica HKI 454, complete genome; 312794749;
NC_014722.1
2723; Asticcacaulis excentricus CB 48 chromosome 2, complete sequence;
315499382; NC_014817.1
2724; Terriglobus saanensis SP1PR4, complete genome; 320105246;
NC_014963.1
2725; Syntrophobotulus glycolicus DSM 8271, complete genome; 325288201;
NC_015172.1
2726; Methanobacterium lacus strain AL-21, complete genome; 325957759;
NC_015216.1
2727; Marinomonas mediterranea MMB-1, complete genome; 326793322;
NC_015276.1
2728; Desulfobacca acetoxidans DSM 11109, complete genome; 328951746;
NC_015388.1
2729; Methylomonas methanica MC09, complete genome; 333981747;
NC_015572.1
2730; Methylomonas methanica MC09, complete genome; 333981747;
NC_015572.1
2731; Methanobacterium paludis strain SWAN1, complete genome;
333986242; NC_015574.1
2732; Novosphingobium sp. PP1Y Lpl large plasmid, complete replicon;
334133217; NC_015579.1
2733; Novosphingobium sp. PP1Y main chromosome, complete replicon;
334139601; NC_015580.1
2734; Frankia symbiont of Datisca glomerata, complete genome; 336176139;
NC_015656.1
2735; Halopiger xanaduensis SH-6 plasmid pHALXA01, complete genome;
336251750; NC_015658.1
2736; Mesorhizobium opportunistum WSM2075, complete genome;
337264537; NC_015675.1
2737; Runella slithyformis DSM 19594, complete genome; 338209545;
NC_015703.1
2738; Runella slithyformis DSM 19594, complete genome; 338209545;
NC_015703.1
2739; Roseobacter litoralis Och 149, complete genome; 339501577;
NC_015730.1
2740; Streptomyces violaceusniger Tu 4113 plasmid pSTRVI01, complete
sequence; 345007457; NC_015951.1
2741; Rhodothermus marinus SG0.5JP17-172, complete genome; 345301888;
NC_015966.1
2742; Sphingobium sp. SYK-6 DNA, complete genome; 347526385;
NC_015976.1
2743; Sphingobium sp. SYK-6 DNA, complete genome; 347526385;
NC_015976.1
2744; Chloracidobacterium thermophilum B chromosome 1, complete
sequence; 347753732; NC_016024.1
2745; Kitasatospora setae KM-6054 DNA, complete genome; 357386972;
NC_016109.1
2746; Kitasatospora setae KM-6054 DNA, complete genome; 357386972;
NC_016109.1
2747; Streptomyces cattleya str. NRRL 8057 main chromosome, complete
genome; 357397620; NC_016111.1
2748; Desulfosporosinus orientis DSM 765, complete genome; 374992780;
NC_016584.1
2749; Paenibacillus terrae HPL-003, complete genome; 374319880;
NC_016641.1
2750; Bacillus megaterium WSH-002, complete genome; 384044176;
NC_017138.1
2751; Francisella cf. novicida 3523, complete genome; 387823583;
NC_017449.1
2752; Streptococcus salivarius JIM8777 complete genome; 387783149;
NC_017595.1
2753; Tistrella mobilis KA081020-065, complete genome; 389875858;
NC_017956.1
2754; Tistrella mobilis KA081020-065 plasmid pTM3, complete sequence;
389874236; NC_017958.1
2755; Legionella pneumophila subsp. pneumophila str. Lorraine chromosome,
complete genome; 397662556; NC_018139.1
2756; Nocardiopsis alba ATCC BAA-2165, complete genome; 403507510;
NC_018524.1
2757; Streptomyces venezuelae ATCC 10712 complete genome; 408675720;
NC_018750.1
2758; Saccharothrix espanaensis DSM 44229 complete genome; 433601838;
NC_019673.1
2759; Nostoc sp. PCC 7107, complete genome; 427705465; NC_019676.1
2760; Rivularia sp. PCC 7116, complete genome; 427733619; NC_019678.1
2761; Rivularia sp. PCC 7116, complete genome; 427733619; NC_019678.1
2762; Synechococcus sp. PCC 6312, complete genome; 427711179;
NC_019680.1
2763; Nostoc sp. PCC 7524, complete genome; 427727289; NC_019684.1
2764; Calothrix sp. PCC 6303, complete genome; 428296779; NC_019751.1
2765; Crinalium epipsammum PCC 9333, complete genome; 428303693;
NC_019753.1
2766; Cylindrospermum stagnate PCC 7417, complete genome; 434402184;
NC_019757.1
2767; Thermobacillus composti KWC4, complete genome; 430748349;
NC_019897.1
2768; Mesorhizobium australicum WSM2073, complete genome; 433771415;
NC_019973.1
2769; Rhodanobacter denitrificans strain 2APBS1, complete genome;
469816339; NC_020541.1
2770; Bacillus sp. 1NLA3E, complete genome; 488570484; NC_021171.1
2771; Bacillus sp. 1NLA3E, complete genome; 488570484; NC_021171.1
2772; Burkholderia thailandensis MSMB121 chromosome 1, complete
sequence; 488601775; NC_021173.1
2773; Streptomyces davawensis strain JCM 4913 complete genome;
471319476; NC_020504.1
2774; Streptomyces davawensis strain JCM 4913 complete genome;
471319476; NC_020504.1
2775; Desulfotomaculum acetoxidans DSM 771, complete genome;
258513366; NC_013216.1
2776; Desulfotomaculum acetoxidans DSM 771, complete genome;
258513366; NC_013216.1
2777; Actinosynnema mirum DSM 43827, complete genome; 256374160;
NC_013093.1
2778; Actinosynnema mirum DSM 43827, complete genome; 256374160;
NC_013093.1
2779; Rhodobacter sphaeroides KD131 chromosome 1, complete sequence;
221638099; NC_011963.1
2780; Bacillus cereus BAG2O-3 acfXF-supercont1.1, whole genome shotgun
sequence; 507017505; NZ_KB976530.1
2781; Bacillus cereus HuA2-9 acqVt-supercont1.1, whole genome shotgun
sequence; 507020427; NZ_KB976152.1
2782; Bacillus cereus HuA3-9 acqVv-supercont1.4, whole genome shotgun
sequence; 507024338; NZ_KB976146.1
2783; Bacillus cereus VD118 acrHo-supercont1.9, whole genome shotgun
sequence; 507035131; NZ_KB976800.1
2784; Bacillus cereus VD131 acrHi-supercont1.9, whole genome shotgun
sequence; 507037581; NZ_KB976660.1
2785; Bacillus cercus VD136 acrHc-supercont1.1, whole genome shotgun
sequence; 507041177; NZ_KB976717.1
2786; Bacillus cereus VDM019 achrj-supercont1.2, whole genome shotgun
sequence; 507056808; NZ_KB976199.1
2787; Bacillus cereus VDM053 acrGS-supcrcont1.7, whole genome shotgun
sequence; 507060152; NZ_KB976714.1
2788; Bacillus cereus VDM006 acrHb-supercont1.1, whole genome shotgun
sequence; 507060269; NZ_KB976864.1
2789; Bacillus cereus VDM021 acrHe-supercont1.1, whole genome shotgun
sequence; 507061629; NZ_KB976905.1
2790; Thermobifida fusca TM51 contig028, whole genome shotgun sequence;
510814910; NZ_AOSG01000028.1
2791; Halomonas anticariensis FP35 = DSM 16096 strain FP35 Scaffold1,
whole genome shotgun sequence; 514429123; NZ_KE332377.1
2792; Halomonas anticariensis FP35 = DSM 16096 strain FP35 Scaffold1,
whole genome shotgun sequence; 514429123; NZ_KE332377.1
2793; Halomonas anticariensis FP35 = DSM 16096 strain FP35 Scaffold1,
whole genome shotgun sequence; 514429123; NZ_KE332377.1
2794; Streptomyces sp. HPH0547 aczHZ-supercont1.2, whole genome
shotgun sequence; 512676856; NZ_KE150472.1
2795; Acinetobacter gyllenbergii MTCC 11365 contig1, whole genome
shotgun sequence; 514348304; NZ_ASQH01000001.1
2796; Streptomyces aurantiacus JA 4570 Seq63, whole genome shotgun
sequence; 514917321; NZ_AOPZ01000063.1
2797; Streptomyces aurantiacus JA 4570 Seq109, whole genome shotgun
sequence; 514918665; NZ_AOPZ01000109.1
2798; Actinoalloteichus spitiensis RMV-1378 Contig406, whole genome
shotgun sequence; 483112234; NZ_AGVX02000406.1
2799; Paenibacillus polymyxa OSY-DF Contig136, whole genome shotgun
sequence; 484036841; NZ_AIPP01000136.1
2800; Fischerella muscicola SAG 1427-1 = PCC 73103 contig00215, whole
genome shotgun sequence; 484073367; NZ_AJLJ01000207.1
2801; Fischerella muscicola PCC 7414 contig00109, whole genome shotgun
sequence; 484075173; NZ_AJLK01000109.1
2802; Fischerella muscicola PCC 7414 contig00153, whole genome shotgun
sequence; 484075372; NZ_AJLK01000153.1
2803; Fischerella thermalis PCC 7521 contig00099, whole genome shotgun
sequence; 484076371; NZ_AJLL01000098.1
2804; Xanthomonas arboricola pv. juglandis str. NCPPB 1447 contig00105,
whole genome shotgun sequence; 484083029; NZ_AJTL01000105.1
2805; Sphingobium xenophagum QYY contig015, whole genome shotgun
sequence; 484272664; NZ_AKIB01000015.1
2806; Pedobacter arcticus A12 Scaffold2, whole genome shotgun sequence;
484345004; NZ_JH947126.1
2807; Leptolyngbya boryana PCC 6306 LepboDRAFT_LPC.1, whole
genome shotgun sequence; 482909028; NZ_KB731324.1
2808; Spirulina subsalsa PCC 9445 Contig210, whole genome shotgun
sequence; 482909235; NZ_JH980292.1
2809; Fischerella sp. PCC 9339 PCC9339DRAFT_scaffold1.1, whole genome
shotgun sequence; 482909394; NZ_JH992898.1
2810; Mastigocladopsis repens PCC 10914 Mas10914DRAFT_scaffold1.1,
whole genome shotgun sequence; 482909462; NZ_JH992901.1
2811; Methylococcus capsulatus str. Texas = ATCC 19069 strain Texas
contig0129, whole genome shotgun sequence; 483090991;
NZ_AMCE01000064.1
2812; Lactococcus garvieae Tac2 Tac2Contig_33, whole genome shotgun
sequence; 483258918; NZ_AMFE01000033.1
2813; Paenisporosarcina sp. TG-14 111.TG14.1_1, whole genome shotgun
sequence; 483299154; NZ_AMGD01000001.1
2814; Paenibacillus sp. ICGEB2008 Contig_7, whole genome shotgun
sequence; 483624383; NZ_AMQU01000007.1
2815; Amphibacillus jilinensis Y1 Scaffold2, whole genome shotgun
sequence; 483992405; NZ_JH976435.1
2816; Alpha proteobacterium LLX12A LLX12A_contig00014, whole genome
shotgun sequence; 483996931; NZ_AMYX01000014.1
2817; Alpha proteobacterium LLX12A LLX12A_contig00026, whole genome
shotgun sequence; 483996974; NZ_AMYX01000026.1
2818; Alpha proteobacterium LLX12A LLX12A_contig00084, whole genome
shotgun sequence; 483997176; NZ_AMYX01000084.1
2819; Alpha proteobacterium L41A L41A_contig00002, whole genome
shotgun sequence; 483997957; NZ_AMYY01000002.1
2820; Nocardiopsis alba DSM 43377 contig_10, whole genome shotgun
sequence; 484007121; NZ_ANAC01000010.1
2821; Nocardiopsis sp. TP-A0876 strain NBRC 110039, whole genome
shotgun sequence; 754924215; NZ_BAZE01000001.1
2822; Nocardiopsis halophila DSM 44494 contig_138, whole genome shotgun
sequence; 484007841; NZ_ANAD01000138.1
2823; Nocardiopsis halophila DSM 44494 contig_138, whole genome shotgun
sequence; 484007841; NZ_ANAD01000138.1
2824; Nocardiopsis halophila DSM 44494 contig_197, whole genome shotgun
sequence; 484008051; NZ_ANAD01000197.1
2825; Nocardiopsis baichengensis YIM 90130 Scaffold15_1, whole genome
shotgun sequence; 484012558; NZ_ANAS01000033.1
2826; Nocardiopsis halotolerans DSM 44410 contig_26, whole genome
shotgun sequence; 484015294; NZ_ANAX01000026.1
2827; Nocardiopsis kunsanensis DSM 44524 contig_3, whole genome shotgun
sequence; 484016825; NZ_ANAY01000003.1
2828; Nocardiopsis kunsanensis DSM 44524 contig_16, whole genome
shotgun sequence; 484016872; NZ_ANAY01000016.1
2829; Nocardiopsis potens DSM 45234 contig_25, whole genome shotgun
sequence; 484017897; NZ_ANBB01000025.1
2830; Nocardiopsis lucentensis DSM 44048 contig_935, whole genome
shotgun sequence; 484021665; NZ_ANBC01000935.1
2831; Nocardiopsis alkaliphila YIM 80379 contig_111, whole genome
shotgun sequence; 484022237; NZ_ANBD01000111.1
2832; Nocardiopsis salina YIM 90010 contig_87, whole genome shotgun
sequence; 484023389; NZ_ANBF01000087.1
2833; Nocardiopsis salina YIM 90010 contig_204, whole genome shotgun
sequence; 484023808; NZ_ANBF01000204.1
2834; Nocardiopsis chromatogenes YIM 90109 contig_59, whole genome
shotgun sequence; 484026076; NZ_ANBH01000059.1
2835; Porphyrobacter sp. AAP82 Contig35, whole genome shotgun sequence;
484033307; NZ_ANFX01000035.1
2836; Blastomonas sp. AAP53 Contig8, whole genome shotgun sequence;
484033611; NZ_ANFZ01000008.1
2837; Blastomonas sp. AAP53 Contig14, whole genome shotgun sequence;
484033631; NZ_ANFZ01000014.1
2838; Paenibacillus sp. PAMC 26794 5104_29, whole genome shotgun
sequence; 484070054; NZ_ANHX01000029.1
2839; Oscillatoria sp. PCC 10802 Osc10802DRAFT_Contig7.7, whole
genome shotgun sequence; 484104632; NZ_KB235948.1
2840; Oscillatoria sp. PCC 10802 Osc10802DRAFT_Contig7.7, whole
genome shotgun sequence; 484104632; NZ_KB235948.1
2841; Clostridium botulinum CB11/1-1 CB_contig00105, whole genome
shotgun sequence; 484141779; NZ_AORM01000006.1
2842; Actinopolyspora halophila DSM 43834 ActhaDRAFT_contig1.1_C,
whole genome shotgun sequence; 484203522; NZ_AQUI01000002.1
2843; Asticcacaulis benevestitus DSM 16100 = ATCC BAA-896 strain DSM
16100 B060DRAFT_scaffold_12.13_C, whole genome shotgun sequence;
484226753; NZ_AQWM01000013.1
2844; Asticcacaulis benevestitus DSM 16100 = ATCC BAA-896 strain DSM
16100 B060DRAFT_scaffold_31.32_C, whole genome shotgun sequence;
484226810; NZ_AQWM01000032.1
2845; Streptomyces sp. FxanaC1 B074DRAFT_scaffold_1.2_C, whole
genome shotgun sequence; 484227180; NZ_AQWO01000002.1
2846; Streptomyces sp. FxanaC1 B074DRAFT_scaffold_7.8_C, whole
genome shotgun sequence; 484227195; NZ_AQWO01000008.1
2847; Smaragdicoccus niigatensis DSM 44881 = NBRC 103563 strain DSM
44881 F600DRAFT_scaffold00011.11_C, whole genome shotgun sequence;
484234624; NZ_AQXZ01000009.1
2848; Sphingomonas melonis DAPP-PG 224 Sphme3DRAFT_scaffold1.1,
whole genome shotgun sequence; 482984722; NZ_KB900605.1
2849; Verrucomicrobium sp. 3C A37ADRAFT_scaffold1.1, whole genome
shotgun sequence; 483219562; NZ_KB901875.1
2850; Verrucomicrobium sp. 3C A37ADRAFT_scaffold1.1, whole genome
shotgun sequence; 483219562; NZ_KB901875.1
2851; Bradyrhizobium sp. WSM2793 A3ASDRAFT_scaffold_24.25, whole
genome shotgun sequence; 483314733; NZ_KB902785.1
2852; Streptomyces vitaminophilus DSM 41686 A3IGDRAFT_scaffold_10.11,
whole genome shotgun sequence; 483682977; NZ_KB904636.1
2853; Ancylobacter sp. FA202 A3M1DRAFT_scaffold1.1, whole genome
shotgun sequence; 483720774; NZ_KB904818.1
2854; Filamentous cyanobacterium ESFC-1 A3MYDRAFT_scaffold1.1,
whole genome shotgun sequence; 483724571; NZ_KB904821.1
2855; Streptomyces sp. CcalMP-8W B053DRAFT_scaffold_17.18, whole
genome shotgun sequence; 483961830; NZ_KB890924.1
2856; Streptomyces sp. ScaeMP-e10 B061DRAFT_scaffold_0.1, whole
genome shotgun sequence; 483967534; NZ_KB891296.1
2857; Streptomyces sp. KhCrAH-244 B069DRAFT_scaffold_11.12, whole
genome shotgun sequence; 483969755; NZ_KB891596.1
2858; Streptomyces sp. HmicA12 B072DRAFT_scaffold_19.20, whole
genome shotgun sequence; 483972948; NZ_KB891808.1
2859; Streptomyces sp. MspMP-M5 B073DRAFT_scaffold_27.28, whole
genome shotgun sequence; 483974021; NZ_KB891893.1
2860; Arthrobacter sp. 161MFSha2.1 C567DRAFT_scaffold00006.6, whole
genome shotgun sequence; 484021228; NZ_KB895788.1
2861; Streptomyces sp. CNY228 D330DRAFT_scaffold00011.11, whole
genome shotgun sequence; 484057944; NZ_KB898231.1
2862; Streptomyces sp. CNB091 D581DRAFT_scaffold00010.10, whole
genome shotgun sequence; 484070161; NZ_KB898999.1
2863; Sphingobium xenophagum NBRC 107872, whole genome shotgun
sequence; 483527356; NZ_BARE01000016.1
2864; Streptomyces sp. TOR3209 Contig612, whole genome shotgun
sequence; 484867900; NZ_AGNH01000612.1
2865; Streptomyces sp. TOR3209 Contig613, whole genome shotgun
sequence; 484867902; NZ_AGNH01000613.1
2866; Stenotrophomonas maltophilia RR-10 STMALcontig40, whole genome
shotgun sequence; 484978121; NZ_AGRB01000040.1
2867; Bacillus oceanisediminis 2691 contig2644, whole genome shotgun
sequence; 485048843; NZ_ALEG01000067.1
2868; Calothrix sp. PCC 7103 Cal7103DRAFT_CPM.6, whole genome
shotgun sequence; 485067373; NZ_KB217478.1
2869; Pseudanabaena sp. PCC 6802 Pse6802_scaffold_5, whole genome
shotgun sequence; 485067426; NZ_KB235914.1
2870; Actinomadura atramentaria DSM 43919 strain SF2197
G339DRAFT_scaffold00002.2, whole genome shotgun sequence; 485090585;
NZ_KB907209.1
2871; Novispirillum itersonii subsp. itersonii ATCC 12639
G365DRAFT_scaffold00001.1, whole genome shotgun sequence; 485091510;
NZ_KB907337.1
2872; Novispirillum itersonii subsp. itersonii ATCC 12639
G365DRAFT_scaffold00001.1, whole genome shotgun sequence; 485091510;
NZ_KB907337.1
2873; Paenibacillus polymyxa ATCC 842 PPt02_scaffold1, whole genome
shotgun sequence; 485269841; NZ_GL905390.1
2874; Actinopolyspora mortivallis DSM 44261 strain HS-1
ActmoDRAFT_scaffold1.1, whole genome shotgun sequence; 486324513;
NZ_KB913024.1
2875; Mesorhizobium loti NZP2037 Meslo3DRAFT_scaffold1.1, whole
genome shotgun sequence; 486325193; NZ_KB913026.1
2876; Paenibacillus sp. HW567 B212DRAFT_scaffold1.1, whole genome
shotgun sequence; 486346141; NZ_KB910518.1
2877; Bacillus sp. 123MFChir2 H280DRAFT_scaffold00030.30, whole
genome shotgun sequence; 487368297; NZ_KB910953.1
2878; Streptomyces canus 299MFChir4.1 H293DRAFT_scaffold00032.32,
whole genome shotgun sequence; 487385965; NZ_KB911613.1
2879; Kribbella catacumbae DSM 19601 A3ESDRAFT_scaffold_7.8_C,
whole genome shotgun sequence; 484207511; NZ_AQUZ01000008.1
2880; Paenibacillus riograndensis SBR5 Contig78, whole genome shotgun
sequence; 485470216; NZ_A
2881; Lamprocystis purpurea DSM 4197 A39ODRAFT_scaffold_0.1, whole
genome shotgun sequence; 483254584; NZ_KB902362.1
2882; Nonomuraea coxensis DSM 45129 A3G7DRAFT_scaffold_4.5, whole
genome shotgun sequence; 483454700; NZ_KB903974.1
2883; Streptomyces scabnsporus DSM 41855 A3ICDRAFT_scaffold_0.1,
whole genome shotgun sequence; 483624586; NZ_KB889561.1
2884; Amycolatopsis alba DSM 44262 scaffold1, whole genome shotgun
sequence; 486330103; NZ_KB913032.1
2885; Amycolatopsis benzoatilytica AK 16/65 AmybeDRAFT_scaffold1.1,
whole genome shotgun sequence; 486399859; NZ_KB912942.1
2886; Amycolatopsis nigrescens CSC17Ta-90 AmyniDRAFT_Contig68.1_C,
whole genome shotgun sequence; 487404592; NZ_ARVW01000001.1
2887; Amycolatopsis nigrescens CSC17Ta-90 AmyniDRAFT_Contig68.1_C,
whole genome shotgun sequence; 487404592; NZ_ARVW01000001.1
2888; Amycolatopsis nigrescens CSC17Ta-90 AmyniDRAFT_Contig68.1_C,
whole genome shotgun sequence; 487404592; NZ_ARVW01000001.1
2889; Reyranella massiliensis 521, whole genome shotgun sequence;
484038067; NZ_HE997181.1
2890; Acidobacteriaceae bacterium KBS 83 G002DRAFT_scaffold00007.7,
whole genome shotgun sequence; 485076323; NZ_KB906739.1
2891; Sphingobium lactosutens DS20 contig 107, whole genome shotgun
sequence; 544811486; NZ_ATDP01000107.1
2892; Novosphingobium lindaniclasticum LE124 contig147, whole genome
shotgun sequence; 544819688; NZ_ATHL01000147.1
2893; Actinobaculum sp. oral taxon 183 str. F0552 Scaffold15, whole genome
shotgun sequence; 545327527; NZ_KE951412.1
2894; Novosphingobium sp. B-7 scaffold147, whole genome shotgun
sequence; 514419386; NZ_KE148338.1
2895; Sphingomonas-like bacterium B12, whole genome shotgun sequence;
484113405; NZ_BACX01000237.1
2896; Sphingomonas-like bacterium B12, whole genome shotgun sequence;
484113491; NZ_BACX01000258.1
2897; Thermoactinomyces vulgaris strain NRRL F-5595 F5595contig15.1,
whole genome shotgun sequence; 929862756; NZ_LGKI01000090.1
2898; Clostridium saccharobutylicum DSM 13864, complete genome;
550916528; NC_022571.1
2899; Butyrivibrio fibrisolvens AB2020 G616DRAFT_scaffold00015.15_C,
whole genome shotgun sequence; 551012921; NZ_ATVZ01000015.1
2900; Butyrivibrio sp. XPD2006 G590DRAFT_scaffold00008.8_C, whole
genome shotgun sequence; 551021553; NZ_ATVT01000008.1
2901; Butyrivibrio sp. AE3009 G588DRAFT_scaffold00030.30_C, whole
genome shotgun sequence; 551035505; NZ_ATVS01000030.1
2902; Acidobacteriaceae bacterium TAA166 strain TAA 166
H979DRAFT_scaffold_0.1_C, whole genome shotgun sequence; 551216990;
NZ_ATWD01000001.1
2903; Acidobacteriaceae bacterium TAA166 strain TAA 166
H979DRAFT_scaffold_0.1_C, whole genome shotgun sequence; 551216990;
NZ_ATWD01000001.1
2904; Acidobacteriaceae bacterium TAA166 strain TAA 166
H979DRAFT_scaffold_0.1_C, whole genome shotgun sequence; 551216990;
NZ_ATWD01000001.1
2905; Leptolyngbya sp. Heron Island J 50, whole genome shotgun sequence;
553739852; NZ_AWNH01000066.1
2906; Leptolyngbya sp. Heron Island J 50, whole genome shotgun sequence;
553739852; NZ_AWNH01000066.1
2907; Leptolyngbya sp. Heron Island J 67, whole genome shotgun sequence;
553740975; NZ_AWNH01000084.1
2908; Klebsiella pneumoniae BIDMC 22 addSE-supercont1.4, whole genome
shotgun sequence; 556268595; NZ_KI535436.1
2909; Klebsiella pneumoniae MGH 19 addTc-supercont1.2, whole genome
shotgun sequence; 556494858; NZ_KI535678.1
2910; Asticcacaulis sp. AC466 contig00008, whole genome shotgun sequence;
557833377; NZ_AWGE01000008.1
2911; Asticcacaulis sp. AC466 contig00033, whole genome shotgun sequence;
557835508; NZ_AWGE01000033.1
2912; Asticcacaulis sp. YBE204 contig00005, whole genome shotgun
sequence; 557839256; NZ_AWGF01000005.1
2913; Asticcacaulis sp. YBE204 contig00010, whole genome shotgun
sequence; 557839714; NZ_AWGF01000010.1
2914; Streptomyces roseochromogenus subsp. oscitans DS 12.976
chromosome, whole genome shotgun sequence; 566155502;
NZ_CM002285.1
2915; Streptomyces roseochromogenus subsp. oscitans DS 12.976
chromosome, whole genome shotgun sequence; 566155502;
NZ_CM002285.1
2916; Bacillus sp. 17376 scaffold00002, whole genome shotgun sequence;
560433869; NZ_KI547189.1
2917; Mesorhizobium sp. LSJC285A00 scaffold0007, whole genome shotgun
sequence; 563442031; NZ_AYVK01000007.1
2918; Mesorhizobium sp. LSJC277A00 scaffold0014, whole genome shotgun
sequence; 563459186; NZ_AYVM01000014.1
2919; Mesorhizobium sp. LSJC269B00 scaffold0015, whole genome shotgun
sequence; 563464990; NZ_AYVN01000015.1
2920; Mesorhizobium sp. LSJC268A00 scaffold0012, whole genome shotgun
sequence; 563469252; NZ_AYVO01000012.1
2921; Mesorhizobium sp. LSJC265A00 scaffold0015, whole genome shotgun
sequence; 563472037; NZ_AYVP01000015.1
2922; Mesorhizobium sp. LSJC264A00 scaffold0029, whole genome shotgun
sequence; 563478461; NZ_AYVQ01000029.1
2923; Mesorhizobium sp. LSJC255A00 scaffold0001, whole genome shotgun
sequence; 563480247; NZ_AYVR01000001.1
2924; Mesorhizobium sp. LSHC426A00 scaffold0005, whole genome shotgun
sequence; 563492715; NZ_AYWO1000005.1
2925; Mesorhizobium sp. LSHC422A00 scaffold0012, whole genome shotgun
sequence; 563497640; NZ_AYVX01000012.1
2926; Mesorhizobium sp. LNJC405B00 scaffold0005, whole genome shotgun
sequence; 563523441; NZ_AYWC01000005.1
2927; Mesorhizobium sp. LNJC403B00 scaffold0001, whole genome shotgun
sequence; 563526426; NZ_AYWD01000001.1
2928; Mesorhizobium sp. LNJC399B00 scaffold0004, whole genome shotgun
sequence; 563530011; NZ_AYWE01000004.1
2929; Mesorhizobium sp. LNJC398B00 scaffold0002, whole genome shotgun
sequence; 563532486; NZ_AYWF01000002.1
2930; Mesorhizobium sp. LNJC395A00 scaffold0011, whole genome shotgun
sequence; 563536456; NZ_AYWG01000011.1
2931; Mesorhizobium sp. LNJC394B00 scaffold0005, whole genome shotgun
sequence; 563539234; NZ_AYWH01000005.1
2932; Mesorhizobium sp. LNJC384A00 scaffold0009, whole genome shotgun
sequence; 563544477; NZ_AYWK01000009.1
2933; Mesorhizobium sp. LNJC380A00 scaffold0009, whole genome shotgun
sequence; 563546593; NZ_AYWL01000009.1
2934; Mesorhizobium sp. LNHC232B00 scaffold0020, whole genome
shotgun sequence; 563561985; NZ_AYWP01000020.1
2935; Mesorhizobium sp. LNHC229A00 scaffold0006, whole genome
shotgun sequence; 563567190; NZ_AYWQ01000006.1
2936; Mesorhizobium sp. LNHC221B00 scaffold0001, whole genome
shotgun sequence; 563570867; NZ_AYWR01000001.1
2937; Mesorhizobium sp. LNHC220B00 scaffold0002, whole genome
shotgun sequence; 563576979; NZ_AYWS01000002.1
2938; Mesorhizobium sp. LNHC209A00 scaffold0002, whole genome
shotgun sequence; 563784877; NZ_AYWT01000002.1
2939; Mesorhizobium sp. L48C026A00 scaffold0030, whole genome shotgun
sequence; 563848676; NZ_AYWU01000030.1
2940; Mesorhizobium sp. L2C089B000 scaffold0011, whole genome shotgun
sequence; 563888034; NZ_AYWV01000011.1
2941; Mesorhizobium sp. L2C084A000 scaffold0007, whole genome shotgun
sequence; 563938926; NZ_AYWX01000007.1
2942; Mesorhizobium sp. L2C067A000 scaffold0014, whole genome shotgun
sequence; 563977521; NZ_AYWY01000014.1
2943; Mesorhizobium sp. L2C066B000 scaffold0012, whole genome shotgun
sequence; 563993080; NZ_AYWZ01000012.1
2944; Mesorhizobium sp. L103C119B0 scaffold0005, whole genome shotgun
sequence; 564005047; NZ_AYXE01000005.1
2945; Mesorhizobium sp. L103C105A0 scaffold0004, whole genome shotgun
sequence; 564008267; NZ_AYXF01000004.1
2946; Xanthomonas hortorum pv. carotae str. M081 chromosome, whole
genome shotgun sequence; 565808720; NZ_CM002307.1
2947; Clostridium pasteurianum NRRL B-598, complete genome; 930593557;
NZ_CP011966.1
2948; Paenibacillus polymyxa CR1, complete genome; 734699963;
NC_023037.2
2949; Streptococcus suis SC84 complete genome, strain SC84; 253750923;
NC_012924.1
2950; Streptococcus suis 10581 Contig00069, whole genome shotgun
sequence; 636868927; NZ_ALKQ01000069.1
2951; Burkholderia pseudomallei HBPUB10134a BP_10134a_103, whole
genome shotgun sequence; 638832186; NZ_AVAL01000102.1
2952; Mycobacterium sp. UM_WGJ Contig_32, whole genome shotgun
sequence; 638971293; NZ_AUWR01000032.1
2953; Mycobacterium iranicum UM_TJL Contig_42, whole genome shotgun
sequence; 638987534; NZ_AUWT01000042.1
2954; Mesorhizobium ciceri CMG6 MescicDRAFT_scaffold_1.2_C, whole
genome shotgun sequence; 639162053; NZ_AWZS01000002.1
2955; Bradyrhizobium sp. ARR65 BraARR65DRAFT_scaffold_9.10_C.
whole genome shotgun sequence; 639168743; NZ_AWZU01000010.1
2956; Paenibacillus sp. MAEPY2 contig7, whole genome shotgun sequence;
639451286; NZ_AWUK01000007.1
2957; Verrucomicrobia bacterium LP2A G346DRAFT_scf7180000000012_quiver.2_C,
whole genome shotgun sequence; 640169055; NZ_JAFS01000002.1
2958; Verrucomicrobia bacterium LP2A G346DRAFT_scf7180000000012_quiver.2_C,
whole genome shotgun sequence; 640169055; NZ_JAFS01000002.1
2959; Robbsia andropogonis Ba3549 160, whole genome shotgun sequence;
640451877; NZ_AYSW01000160.1
2960; Bacillus mannanilyticus JCM 10596, whole genome shotgun sequence;
640600411; NZ_BAMO01000071.1
2961; Bacillus sp. H1a Contig1, whole genome shotgun sequence; 640724079;
NZ_AYMH01000001.1
2962; Enterococcus faecalis ATCC 4200 supercont1.2, whole genome shotgun
sequence; 239948580; NZ_GG670372.1
2963; Enterococcus faecalis EnGen0363 strain RMC5 acAqY-supercont1.4,
whole genome shotgun sequence; 502232520; NZ_KB944632.1
2964; Enterococcus faecalis LA3B-2 Scaffold22, whole genome shotgun
sequence; 522837181; NZ_KE352807.1
2965; Bifidobacterium breve NCFB 2258, complete genome; 749295448;
NZ_CP006714.1
2966; Sphingomonas sanxanigenens NX02, complete genome; 749321911;
NZ_CP006644.1
2967; Nocardia nova SH22a, complete genome; 753809381; NZ_CP006850.1
2968; Kutzneria albida DSM 43870, complete genome; 754862786;
NZ_CP007155.1
2969; Paenibacillus polymyxa SQR-21, complete genome; 749205063;
NZ_CP006872.1
2970; Burkholderia thailandensis E264 chromosome I, complete sequence;
83718394; NC_007651.1
2971; Burkholderia thailandensis H0587 chromosome 1, complete sequence;
759581710; NZ_CP004089.1
2972; Sphingobium barthaii strain KK22, whole genome shotgun sequence;
646523831; NZ_BATN01000047.1
2973; Sphingobium barthaii strain KK22, whole genome shotgun sequence;
646529442; NZ_BATN01000092.1
2974; Paenibacillus polymyxa 1-43 S143_contig00221, whole genome
shotgun sequence; 647225094; NZ_ASRZ01000173.1
2975; Paenibacillus sp. 1-49 S149_contig00281, whole genome shotgun
sequence; 647230448; NZ_ASRY01000102.1
2976; Paenibacillus graminis RSA19 S2_contig00597, whole genome shotgun
sequence; 647256651; NZ_ASSG01000304.1
2977; Paenibacillus sp. 1-18 S118_contig00103, whole genome shotgun
sequence; 647269417; NZ_ASSB01000031.1
2978; Paenibacillus polymyxa TD94 STD94_contig00759, whole genome
shotgun sequence; 647274605; NZ_ASSA01000134.1
2979; Bacillus flexus T6186-2 contig_106, whole genome shotgun sequence;
647636934; NZ_JANV01000106.1
2980; Brevundimonas naejangsanensis strain B1 contig000018, whole genome
shotgun sequence; 647728918; NZ_JHOF01000018.1
2981; Burkholderia thailandensis E555 BTHE555_314, whole genome
shotgun sequence; 485035557; NZ_AECN01000315.1
2982; Burkholderia oklahomensis C6786 chromosome I, complete sequence;
780352952; NZ_CP009555.1
2983; Bacillus endophyticus 2102 contig21, whole genome shotgun sequence;
485049179; NZ_ALIM01000014.1
2984; Methylococcus capsulatus str. Texas = ATCC 19069 strain Texas
contig0129, whole genome shotgun sequence; 483090991;
NZ_AMCE01000064.1
2985; Sphingomonas-like bacterium B12, whole genome shotgun sequence;
484115568; NZ_BACX01000797.1
2986; Nocardiopsis halotolerans DSM 44410 contig_372, whole genome
shotgun sequence; 484016556; NZ_ANAX01000372.1
2987; Nonomuraea coxensis DSM 45129 A3G7DRAFT_scaffold_4.5, whole
genome shotgun sequence; 483454700; NZ_KB903974.1
2988; Streptomyces sp. CcalMP-8W B053DRAFT_scaffold_0.1, whole
genome shotgun sequence; 483961722; NZ_KB890915.1
2989; Spirosoma spitsbergense DSM 19989 B157DRAFT_scaffold_76.77,
whole genome shotgun sequence; 483994857; NZ_KB893599.1
2990; Butyrivibrio sp. XBB1001 G631DRAFT_scaffold00005.5_C, whole
genome shotgun sequence; 651376721; NZ_AUKA01000006.1
2991; Butyrivibrio sp. XPD2002 G587DRAFT_scaffold00011.11, whole
genome shotgun sequence; 651381584; NZ_KE384117.1
2992; Butyrivibrio sp. NC3005 G634DRAFT_scaffold00001.1, whole
genome shotgun sequence; 651394394; NZ_KE384206.1
2993; Butyrivibrio sp. MC2021 T359DRAFT_scaffold00010.10_C, whole
genome shotgun sequence; 651407979; NZ_JHXX01000011.1
2994; Paenarthrobacter nicotinovorans 231Sha2.1M6
I960DRAFT_scaffold00004.4_C, whole genome shotgun sequence;
651445346; NZ_AZVC01000006.1
2995; Bacillus sp. J37 BacJ37DRAFT_scaffold_0.1_C, whole genome
shotgun sequence; 651516582; NZ_JAEK01000001.1
2996; Bacillus sp. J37 BacJ37DRAFT_scaffold_0.1_C, whole genome
shotgun sequence; 651516582; NZ_JAEK01000001.1
2997; Bacillus sp. UNC437CL72CviS29 M014DRAFT_scaffold00009.9_C,
whole genome shotgun sequence; 651596980; NZ_AXVB01000011.1
2998; Butyrivibrio sp. FC2001 G601DRAFT_scaffold00001.1, whole genome
shotgun sequence; 651921804; NZ_KE384132.1
2999; Bacillus bogoriensis ATCC BAA-922
T323DRAFT_scaffold00008.8_C, whole genome shotgun sequence;
651937013; NZ_JHYI01000013.1
3000; Bacillus bogoriensis ATCC BAA-922
T323DRAFT_scaffold00008.8_C, whole genome shotgun sequence;
651937013; NZ_JHYI01000013.1
3001; Bacillus kribbensis DSM 17871 H539DRAFT_scaffold00003.3, whole
genome shotgun sequence; 651983111; NZ_KE387239.1
3002; Fischerella sp. PCC 9431 Fis9431DRAFT_Scaffold1.2, whole genome
shotgun sequence; 652326780; NZ_KE650771.1
3003; Fischerella sp. PCC 9605 FIS9605DRAFT_scaffold2.2, whole genome
shotgun sequence; 652337551; NZ_KI912149.1
3004; Clostridium akagii DSM 12554 BR66DRAFT_scaffold00010.10_C,
whole genome shotgun sequence; 652488076; NZ_JMLK01000014.1
3005; Clostridium beijerinckii HUN142 T483DRAFT_scaffold00004.4, whole
genome shotgun sequence; 652494892; NZ_KK211337.1
3006; Glomeribacter sp. 1016415 H174DRAFT_scaffold00001.1, whole
genome shotgun sequence; 652527059; NZ_KE384226.1
3007; Glomeribacter sp. 1016415 H174DRAFT_scaffold00001.1, whole
genome shotgun sequence; 652527059; NZ_KE384226.1
3008; Mesorhizobium sp. URHA0056 H959DRAFT_scaffold00004.4_C,
whole genome shotgun sequence; 652670206; NZ_AUEL01000005.1
3009; Mesorhizobium loti R88b Meslo2DRAFT_Scaffold1.1, whole genome
shotgun sequence; 652688269; NZ_KI912159.1
3010; Mesorhizobium ciceri WSM4083 MESCI2DRAFT_scaffold_0.1,
whole genome shotgun sequence; 652698054; NZ_KI912610.1
3011; Mesorhizobium sp. URHC0008 N549DRAFT_scaffold00001.1_C,
whole genome shotgun sequence; 652699616; NZ_JIAP01000001.1
3012; Mesorhizobium sp. URHB0007 N550DRAFT_scaffold00001.1_C,
whole genome shotgun sequence; 652714310; NZ_JIAO01000011.1
3013; Mesorhizobium erdmanii USDA 3471 A3AUDRAFT_scaffold_7.8_C,
whole genome shotgun sequence; 652719874; NZ_AXAE01000013.1
3014; Mesorhizobium loti CJ3sym A3A9DRAFT_scaffold_25.26_C, whole
genome shotgun sequence; 652734503; NZ_AXAL01000027.1
3015; Cohnella thermotolerans DSM 17683
G485DRAFT_scaffold00041.41_C, whole genome shotgun sequence;
652787974; NZ_AUCP01000055.1
3016; Cohnella thermotolerans DSM 17683
G485DRAFT_scaffold00041.41_C, whole genome shotgun sequence;
652787974; NZ_AUCP01000055.1
3017; Cohnella thermotolerans DSM 17683 G485DRAFT_scaffold00003.3,
whole genome shotgun sequence; 652794305; NZ_KE386956.1
3018; Lachnospiraceae bacterium NK4A144 G619DRAFT_scaffold00002.2_C,
whole genome shotgun sequence; 652826657; NZ_AUJT01000002.1
3019; Mesorhizobium sp. WSM3626 Mesw3626DRAFT_scaffold_6.7_C,
whole genome shotgun sequence; 652879634; NZ_AZUY01000007.1
3020; Mesorhizobium sp. WSM1293 MesloDRAFT_scaffold_4.5, whole
genome shotgun sequence; 652910347; NZ_KI911320.1
3021; Mesorhizobium sp. WSM3224 YU3DRAFT_scaffold_3.4_C, whole
genome shotgun sequence; 652912253; NZ_ATYO01000004.1
3022; Butyrivibrio fibrisolvens MD2001 G635DRAFT_scaffold00033.33_C,
whole genome shotgun sequence; 652963937; NZ_AUKD01000034.1
3023; Legionella pneumophila subsp. pneumophila strain ATCC 33155
contig032, whole genome shotgun sequence; 652971687;
NZ_JFIN01000032.1
3024; Legionella pneumophila subsp. pneumophila strain ATCC 33154
Scaffold2, whole genome shotgun sequence; 653016013; NZ_KK074241.1
3025; Legionella pneumophila subsp. pneumophila strain ATCC 33823
Scaffold7, whole genome shotgun sequence; 653016661; NZ_KK074199.1
3026; Bacillus sp. URHB0009 H980DRAFT_scaffold00016.16_C, whole
genome shotgun sequence; 653070042; NZ_AUER01000022.1
3027; Lachnospira multipara ATCC 19207 G600DRAFT_scaffold00009.9_C,
whole genome shotgun sequence; 653218978; NZ_AUJG01000009.1
3028; Lachnospira multipara MC2003 T520DRAFT_scaffold00007.7_C,
whole genome shotgun sequence; 653225243; NZ_JHWY01000011.1
3029; Rhodanobacter sp. OR87 RhoOR87DRAFT_scaffold_24.25_C, whole
genome shotgun sequence; 653308965; NZ_AXBJ01000026.1
3030; Rhodanobacter sp. OR92 RhoOR92DRAFT_scaffold_6.7_C, whole
genome shotgun sequence; 653321547; NZ_ATYF01000013.1
3031; Rhodanobacter sp. OR444
RHOOR444DRAFT_NODE_5_len_27336_cov_289_843719.5_C, whole
genome shotgun sequence; 653325317; NZ_ATYD01000005.1
3032; Rhodanobacter sp. OR444
RHOOR444DRAFT_NODE_39_len_52063_cov_320_872864.39, whole
genome shotgun sequence; 653330442; NZ_KE386531.1
3033; Bradyrhizobium sp. WSM1743 YU9DRAFT_scaffold_1.2_C, whole
genome shotgun sequence; 653526890; NZ_AXAZ01000002.1
3034; Bradyrhizobium sp. Aila-2 K288DRAFT_scaffold00086.86_C, whole
genome shotgun sequence; 653556699; NZ_AUEZ01000087.1
3035; Clostridium butyricum AGR2140 G607DRAFT_scaffold00008.8_C,
whole genome shotgun sequence; 653632769; NZ_AUJN01000009.1
3036; Mastigocoleus testanun BC008 Contig-2, whole genome shotgun
sequence; 959926096; NZ_LMTZ01000085.1
3037; [Eubacterium] cellulosolvens LD2006 T358DRAFT_scaffold00002.2_C,
whole genome shotgun sequence; 654392970; NZ_JHXY01000005.1
3038; Desulfatiglans anilini DSM 4660 H567DRAFT_scaffold00005.5_C,
whole genome shotgun sequence; 654868823; NZ_AULM01000005.1
3039; Legionella pneumophila subsp. fraseri strain ATCC 35251 contig031,
whole genome shotgun sequence; 654928151; NZ_JFIG01000031.1
3040; Bacillus sp. FJAT-14578 Scaffold2, whole genome shotgun sequence;
654948246; NZ_KI632505.1
3041; Bacillus sp. J13 PaeJ13DRAFT_scaffold_4.5_C, whole genome shotgun
sequence; 654954291; NZ_JAEO01000006.1
3042; Bacillus sp. 278922_107 H622DRAFT_scaffold00001.1, whole genome
shotgun sequence; 654964612; NZ_KI911354.1
3043; Streptomyces sp. GXT6 genomic scaffold Scaffold4, whole genome
shotgun sequence; 654975403; NZ_KI601366.1
3044; Ruminococcus flavefaciens ATCC 19208 L870DRAFT_scaffold00001.1,
whole genome shotgun sequence; 655069822; NZ_KI912489.1
3045; Paenibacillus sp. UNCCL52 BR01DRAFT_scaffold00001.1, whole
genome shotgun sequence; 655095448; NZ_KK366023.1
3046; Paenibacillus sp. UNC451MF BP97DRAFT_scaffold00018.18_C,
whole genome shotgun sequence; 655103160; NZ_JMLS01000021.1
3047; Paenibacillus pinihumi DSM 23905 = JCM 16419 strain DSM 23905
H583DRAFT_scaffold00005.5, whole genome shotgun sequence; 655115689;
NZ_KE383867.1
3048; Desulfobulbus japonicus DSM 18378 G493DRAFT_scaffold00011.11_C,
whole genome shotgun sequence; 655133038; NZ_AUCV01000014.1
3049; Desulfobulbus mediterraneus DSM 13871 G494DRAFT_scaffold00028.28_C,
whole genome shotgun sequence; 655138083; NZ_AUCW01000035.1
3050; Paenibacillus harenae DSM 16969 H581DRAFT_scaffold00002.2,
whole genome shotgun sequence; 655165706; NZ_KE383843.1
3051; Shimazuella kribbensis DSM 45090 A3GQDRAFT_scaffold_0.1_C,
whole genome shotgun sequence; 655370026; NZ_ATZF01000001.1
3052; Shimazuella kribbensis DSM 45090 A3GQDRAFT_scaffold_5.6_C,
whole genome shotgun sequence; 655371438; NZ_ATZF01000006.1
3053; Streptomyces flavidovirens DSM 40150
G412DRAFT_scaffold00007.7_C, whole genome shotgun sequence;
655414006; NZ_AUBE01000007.1
3054; Streptomyces flavidovirens DSM 40150
G412DRAFT_scaffold00009.9, whole genome shotgun sequence; 655416831;
NZ_KE386846.1
3055; Terasakiella pusilia DSM 6293 Q397DRAFT_scaffold00039.39_C,
whole genome shotgun sequence; 655499373; NZ_JHYO01000039.1
3056; Pseudoxanthomonas suwonensis J43 Psesu2DRAFT_scaffold_44.45_C,
whole genome shotgun sequence; 655566937; NZ_JAES01000046.1
3057; Pseudonocardia acaciae DSM 45401 N912DRAFT_scaffold00002.2_C,
whole genome shotgun sequence; 655569633; NZ_JIAI01000002.1
3058; Azospirillum halopraeferens DSM 3675
G472DRAFT_scaffold00039.39_C, whole genome shotgun sequence;
655967838; NZ_AUCF01000044.1
3059; Clostridium scatologenes strain ATCC 25775, complete genome;
802929558; NZ_CP009933.1
3060; Paenibacillus harenae DSM 16969 H581DRAFT_scaffold00004.4,
whole genome shotgun sequence; 656245934; NZ_KE383845.1
3061; Paenibacillus harenae DSM 16969 H581DRAFT_scaffold00004.4,
whole genome shotgun sequence; 656245934; NZ_KE383845.1
3062; Paenibacillus alginolyticus DSM 5050 = NBRC 15375 strain DSM 5050
G519DRAFT_scaffold00043.43_C, whole genome shotgun sequence;
656249802; NZ_AUGY01000047.1
3063; Bacillus indicus strain DSM 16189 Contig01, whole genome shotgun
sequence; 737222016; NZ_JNVC02000001.1
3064; Acaryochloris sp. CCMEE 5410 contig00232, whole genome shotgun
sequence; 359367134; NZ_AFEJ01000154.1
3065; Bacillus sp. RP1137 contig_18, whole genome shotgun sequence;
657210762; NZ_AXZS01000018.1
3066; Streptomyces leeuwenhoekii strain C34(2013) c34_sequence_0501,
whole genome shotgun sequence; 657301257; NZ_AZSD01000480.1
3067; Brevundimonas bacteroides DSM 4726
Q333DRAFT_scaffold00004.4_C, whole genome shotgun sequence;
657605746; NZ_JNIX01000010.1
3068; Bacillus thuringiensis LM1212 scaffold_08, whole genome shotgun
sequence; 657629081; NZ_AYPV01000024.1
3069; Klebsiella pneumoniae 4541-2 4541_2_67, whole genome shotgun
sequence; 657698352; NZ_JDWO01000067.1
3070; Lachnoclostridium phytofermentans KNHs212
BO10DRAFT_scf7180000000004_quiver.1_C, whole genome shotgun
sequence; 657706549; NZ_JNLM01000001.1
3071; Paenibacillus polymyxa strain WLY78 S6_contig00095, whole genome
shotgun sequence; 657719467; NZ_ALJV01000094.1
3072; Bacillus indicus strain DSM 16189 Contig01, whole genome shotgun
sequence; 737222016; NZ_JNVC02000001.1
3073; [Scytonema hofmanni] UTEX 2349 Tol9009DRAFT_TPD.8, whole
genome shotgun sequence; 657935980; NZ_KK073768.1
3074; Caulobacter sp. UNC358MFTsu5.1 BR39DRAFT_scaffold00002.2_C,
whole genome shotgun sequence; 659864921; NZ_JONW01000006.1
3075; Sphingomonas sp. YL-JM2C contig056, whole genome shotgun
sequence; 661300723; NZ_ASIM01000056.1
3076; Streptomyces monomycini strain NRRL B-24309
P063_Doro1_scaffold135, whole genome shotgun sequence; 662059070;
NZ_KL571162.1
3077; Streptomyces flavotricini strain NRRL B-5419 contig237.1, whole
genome shotgun sequence; 662063073; NZ_JNXV01000303.1
3078; Streptomyces peruviensis strain NRRL ISP-5592
P181_Doro1_scaffold152, whole genome shotgun sequence; 662097244;
NZ_KL575165.1
3079; Sphingomonas sp. DC-6 scaffold87, whole genome shotgun sequence;
662140302; NZ_JMUB01000087.1
3080; Streptomyces sp. NRRL S-455 contig1.1, whole genome shotgun
sequence; 663192162; NZ_JOCT01000001.1
3081; Streptomyces griseoluteus strain NRRL ISP-5360 contig43.1, whole
genome shotgun sequence; 663180071; NZ_JOBE01000043.1
3082; Streptomyces sp. NRRL S-350 contig12.1, whole genome shotgun
sequence; 663199697; NZ_JOHO01000012.1
3083; Streptomyces katrae strain NRRL B-16271 contig37.1, whole genome
shotgun sequence; 663300941; NZ_JNZY01000037.1
3084; Streptomyces sp. NRRL B-3229 contig5.1, whole genome shotgun
sequence; 663316931; NZ_JOGP01000005.1
3085; Streptomyces flavochromogenes strain NRRL B-2684 contig8.1, whole
genome shotgun sequence; 663317502; NZ_JNZO01000008.1
3086; Streptomyces roseoverticillatus strain NRRL B-3500 contig22.1, whole
genome shotgun sequence; 663372343; NZ_JOFL01000022.1
3087; Streptomyces roseoverticillatus strain NRRL B-3500 contig31.1, whole
genome shotgun sequence; 663372947; NZ_JOFL01000031.1
3088; Streptomyces roseoverticillatus strain NRRL B-3500 contig43.1, whole
genome shotgun sequence; 663373497; NZ_JOFL01000043.1
3089; Streptomyces rimosus subsp. rimosus strain NRRL WC-3924 contig19.1,
whole genome shotgun sequence; 663376433; NZ_JOBW01000019.1
3090; Streptomyces rimosus subsp. rimosus strain NRRL WC-3924 contig82.1,
whole genome shotgun sequence; 663379797; NZ_JOBW01000082.1
3091; Streptomyces sp. NRRL B-12105 contig1.1, whole genome shotgun
sequence; 663380895; NZ_JNZW01000001.1
3092; Herbidospora cretacea strain NRRL B-16917 contig7.1, whole genome
shotgun sequence; 663670981; NZ_JODQ01000007.1
3093; Lechevalieria aerocolonigenes strain NRRL B-3298 contig27.1, whole
genome shotgun sequence; 663693444; NZ_JOFJ01000027.1
3094; Microbispora rosea subsp. nonnitritogenes strain NRRL B-2631 contig12.1,
whole genome shotgun sequence; 663732121; NZ_JNZQ01000012.1
3095; Sphingobium sp. DC-2 ODE_45, whole genome shotgun sequence;
663818579; NZ_JNAC01000042.1
3096; Streptomyces aureocirculatus strain NRRL ISP-5386 contig49.1, whole
genome shotgun sequence; 664026629; NZ_JOAP01000049.1
3097; Streptomyces rimosus subsp. rimosus strain NRRL B-2660 contig14.1,
whole genome shotgun sequence; 664052786; NZ_JOES01000014.1
3098; Streptomyces achromogenes subsp. achromogenes strain NRRL B-2120 contig2.1,
whole genome shotgun sequence; 664063830; NZ_JODT01000002.1
3099; Streptomyces rimosus subsp. rimosus strain NRRL B-2660 contig124.1,
whole genome shotgun sequence; 664066234; NZ_JOES01000124.1
3100; Streptomyces rimosus subsp. rimosus strain NRRL WC-3927 contig5.1,
whole genome shotgun sequence; 664091759; NZ_JOBO01000005.1
3101; Streptomyces rimosus subsp. rimosus strain NRRL WC-3869 P248contig50.1,
whole genome shotgun sequence; 925315417; LGCQ01000244.1
3102; Streptomyces rimosus subsp. rimosus strain NRRL WC-3929 contig5.1,
whole genome shotgun sequence; 664104387; NZ_JOJJ01000005.1
3103; Streptomyces rimosus subsp. rimosus strain NRRL WC-3929 contig46.1,
whole genome shotgun sequence; 664115745; NZ_JOJJ01000046.1
3104; Streptomyces rimosus subsp. rimosus strain NRRL WC-3904 contig10.1,
whole genome shotgun sequence; 664126885; NZ_JOCQ01000010.1
3105; Streptomyces rimosus subsp. rimosus strain NRRL WC-3904 contig106.1,
whole genome shotgun sequence; 664141810; NZ_JOCQ01000106.1
3106; Streptomyces sp. NRRL F-2890 contig2.1, whole genome shotgun
sequence; 664194528; NZ_JOIG01000002.1
3107; Streptomyces griseus subsp. griseus strain NRRL F-5618 contig4.1,
whole genome shotgun sequence; 664233412; NZ_JOGN01000004.1
3108; Streptomyces lavenduligriseus strain NRRL ISP-5487 contig2.1, whole
genome shotgun sequence; 664244706; NZ_JOBD01000002.1
3109; Streptomyces sp. NRRL S-920 contig3.1, whole genome shotgun
sequence; 664245663; NZ_JODF01000003.1
3110; Streptomyces hygroscopicus subsp. hygroscopicus strain NRRL B-1477 contig8.1,
whole genome shotgun sequence; 664299296; NZ_JOIK01000008.1
3111; Streptomyces sp. NRRL F-4474 contig32.1, whole genome shotgun
sequence; 664323078; NZ_JOIB01000032.1
3112; Streptomyces sp. NRRL S-475 contig32.1, whole genome shotgun
sequence; 664325162; NZ_JOJB01000032.1
3113; Streptomyces sp. NRRL F-5053 contig1.1, whole genome shotgun
sequence; 664356765; NZ_JOHT01000001.1
3114; Streptomyces sp. NRRL S-1868 contig54.1, whole genome shotgun
sequence; 664360925; NZ_JOGD01000054.1
3115; Streptomyces sp. NRRL S-646 contig23.1, whole genome shotgun
sequence; 664421883; NZ_JODC01000023.1
3116; Streptomyces sp. NRRL S-455 contig1.1, whole genome shotgun
sequence; 663192162; NZ_JOCT01000001.1
3117; Streptomyces sp. NRRL S-481 P269_Doro1_scaffold20, whole genome
shotgun sequence; 664428976; NZ_KL585179.1
3118; Streptomyces sp. NRRL F-5140 contig927.1, whole genome shotgun
sequence; 664434000; NZ_JOIA01001078.1
3119; Streptomyces sp. NRRL WC-3773 contig2.1, whole genome shotgun
sequence; 664478668; NZ_JOJI01000002.1
3120; Streptomyces sp. NRRL WC-3773 contig5.1, whole genome shotgun
sequence; 664479796; NZ_JOJI01000005.1
3121; Streptomyces sp. NRRL WC-3773 contig11.1, whole genome shotgun
sequence; 664481891; NZ_JOJI01000011.1
3122; Streptomyces sp. NRRL WC-3773 contig11.1, whole genome shotgun
sequence; 664481891; NZ_JOJI01000011.1
3123; Streptomyces puniceus strain NRRL ISP-5083 contig3.1, whole genome
shotgun sequence; 663149970; NZ_JOBQ01000003.1
3124; Streptomyces ochraceiscleroticus strain NRRL ISP-5594 contig9.1,
whole genome shotgun sequence; 664540649; NZ_JOAX01000009.1
3125; Streptomyces durhamensis strain NRRL B-3309 contig3.1, whole
genome shotgun sequence; 665586974; NZ_JNXR01000003.1
3126; Streptomyces durhamensis strain NRRL B-3309 contig23.1, whole
genome shotgun sequence; 665604093; NZ_JNXR01000023.1
3127; Streptomyces rimosus subsp. rimosus strain NRRL WC-3869 P248contig20.1,
whole genome shotgun sequence; 925322461; LGCQ01000113.1
3128; Streptomyces niveus NCIMB 11891 chromosome, whole genome
shotgun sequence; 566146291; NZ_CM002280.1
3129; Paenibacillus polymyxa strain CICC 10580 contig_11, whole genome
shotgun sequence; 670516032; NZ_JNCB01000011.1
3130; Streptomyces megasporus strain NRRL B-16372 contig19.1, whole
genome shotgun sequence; 671525382; NZ_JODL01000019.1
3131; Dyadobacter crusticola DSM 16708 Q369DRAFT_scaffold00002.2,
whole genome shotgun sequence; 671546962; NZ_KL370786.1
3132; Bacillus sp. MB2021 T349DRAFT_scaffold00010.10_C, whole
genome shotgun sequence; 671553628; NZ_JNJJ01000011.1
3133; Lachnospira multipara LB2003 T537DRAFT_scaffold00010.10_C,
whole genome shotgun sequence; 671578517; NZ_JNKW01000011.1
3134; Clostridium drakei strain SL1 contig_20, whole genome shotgun
sequence; 692121046; NZ_JIBU02000020.1
3135; Candidatus Paracaedibacter symbiosus strain PRA9 Scaffold_1, whole
genome shotgun sequence; 692233141; NZ_JQAK01000001.1
3136; Stenotrophomonas maltophilia strain 53 contig_2, whole genome
shotgun sequence; 692316574; NZ_JRJA01000002.1
3137; Rhodococcus fascians LMG 3625 contig38, whole genome shotgun
sequence; 694033726; NZ_JMEM01000016.1
3138; Rhodococcus fascians 04-516 contig54, whole genome shotgun
sequence; 694058371; NZ_JMFD01000020.1
3139; Klebsiella michiganensis strain R8A contig_44, whole genome shotgun
sequence; 695806661; NZ_JNCH01000044.1
3140; Streptomyces globisporus C-1027 Scaffold24_1, whole genome shotgun
sequence; 410651191; NZ_AJUO01000171.1
3141; Streptomyces sp. NRRL B-1381 contig33.1, whole genome shotgun
sequence; 663334964; NZ_JOHG01000033.1
3142; Streptomyces sp. SolWspMP-sol2th B083DRAFT_scaffold_17.18_C,
whole genome shotgun sequence; 654969845; NZ_ARPF01000020.1
3143; Streptomyces alboviridis strain NRRL B-1579 contig18.1, whole
genome shotgun sequence; 695845602; NZ_JNWU01000018.1
3144; Streptomyces sp. NRRL F-5681 contig10.1, whole genome shotgun
sequence; 663292631; NZ_JOHA01000010.1
3145; Streptomyces globisporus subsp. globisporus strain NRRL B-2709 contig24.1,
whole genome shotgun sequence; 664051798; NZ_JNZK01000024.1
3146; Streptomyces griseus subsp. griseus strain NRRL F-5144 contig19.1,
whole genome shotgun sequence; 664184565; NZ_JOGA01000019.1
3147; Streptomyces floridae strain NRRL 2423 contig7.1, whole genome
shotgun sequence; 663343774; NZ_JOAC01000007.1
3148; Streptomyces roseosporus NRRL 11379 supercont4.1, whole genome
shotgun sequence; 588273405; NZ_ABYX02000001.1
3149; Streptomyces cyaneofuscatus strain NRRL B-2570 contig9.1, whole
genome shotgun sequence; 664021017; NZ_JOEM01000009.1
3150; Streptomyces sp. NRRL S-623 contig14.1, whole genome shotgun
sequence; 665522165; NZ_JOJC01000016.1
3151; Streptomyces sp. JS01 contig2, whole genome shotgun sequence;
695871554; NZ_JPWW01000002.1
3152; Streptomyces albus subsp. albus strain NRRL B-2445 contig28.1, whole
genome shotgun sequence; 664095100; NZ_JOED01000028.1
3153; Streptomyces baarnensis strain NRRL B-2842 P144_Doro1_scaffold26,
whole genome shotgun sequence; 662135579; NZ_KL573564.1
3154; Streptomyces griseus subsp. griseus strain NRRL F-2227 contig41.1,
whole genome shotgun sequence; 664325626; NZ_JOIT01000041.1
3155; Streptomyces sp. W007 contig00293, whole genome shotgun sequence;
365867746; NZ_AGSW01000272.1
3156; Streptomyces mediolani strain NRRL WC-3934 contig31.1, whole
genome shotgun sequence; 664285409; NZ_JOJK01000031.1
3157; Streptomyces sp. NRRL WC-3773 contig36.1, whole genome shotgun
sequence; 664487325; NZ_JOJI01000036.1
3158; Mesorhizobium japonicum R7A MesloDRAFT_Scaffold1.1, whole
genome shotgun sequence; 696358903; NZ_KI632510.1
3159; Stenotrophomonas maltophilia RA8, whole genome shotgun sequence;
493412056; NZ_CALM01000701.1
3160; Streptomyces rimosus subsp. rimosus strain NRRL B-2660 contig59.1,
whole genome shotgun sequence; 664061406; NZ_JOES01000059.1
3161; Streptomyces rimosus subsp. rimosus strain NRRL B-16073 contig7.1,
whole genome shotgun sequence; 696493030; NZ_JNWX01000007.1
3162; Streptomyces rimosus subsp. rimosus strain NRRL B-16073 contig48.1,
whole genome shotgun sequence; 696497741; NZ_JNWX01000048.1
3163; Sphingopyxis sp. MWB1 contig00002, whole genome shotgun
sequence; 696542396; NZ_JQFJ01000002.1
3164; Blautia producta strain ER3 contig_8, whole genome shotgun sequence;
696661199; NZ_JPJF01000008.1
3165; Streptomyces griseus subsp. griseus strain NRRL B-2307 contig15.1,
whole genome shotgun sequence; 702684649; NZ_JNZI01000015.1
3166; Kitasatospora setae KM-6054 DNA, complete genome; 357386972;
NC_016109.1
3167; Streptomyces lydicus strain NRRL ISP-5461 contig41.1, whole genome
shotgun sequence; 702808005; NZ_JNZA01000041.1
3168; Streptomyces iakyrus strain NRRL ISP-5482 contig6.1, whole genome
shotgun sequence; 702914619; NZ_JNXI01000006.1
3169; Kibdelosporangium aridum subsp. largum strain NRRL B-24462 contig4.56,
whole genome shotgun sequence; 703210604; NZ_JNYM01000124.1
3170; Kibdelosporangium aridum subsp. largum strain NRRL B-24462 contig91.4,
whole genome shotgun sequence; 703243970; NZ_JNYM01001429.1
3171; Xanthomonas campestris pv. viticola strain LMG 965, whole genome
shotgun sequence; 704493846; NZ_CBZT010000006.1
3172; Streptomyces galbus strain KCCM 41354 contig00021, whole genome
shotgun sequence; 716912366; NZ_JRHJ01000016.1
3173; Bacillus aryabhattai strain GZ03 contig1_scaffold1, whole genome
shotgun sequence; 723602665; NZ_JPIE01000001.1
3174; Bacillus mycoides FSL H7-687 Contig052, whole genome shotgun
sequence; 727271768; NZ_ASPY01000052.1
3175; Bacillus mycoides strain Flugge 10206 DJ94.contig-100_16, whole
genome shotgun sequence; 727343482; NZ_JMQD01000030.1
3176; Streptomyces anulatus strain NRRL B-2873 contig21.1, whole genome
shotgun sequence; 664049400; NZ_JOEZ01000021.1
3177; Sphingomonas sp. 37zxx contig3_scaffold2, whole genome shotgun
sequence; 728813405; NZ_JRQH01000003.1
3178; Sphingomonas sp. 35-24ZXX contig11_scaffold1, whole genome
shotgun sequence; 728827031; NZ_JROG01000008.1
3179; Sphingomonas sp. Ant H11 contig_149, whole genome shotgun
sequence; 730274767; NZ_JSBN01000149.1
3180; Sphingomonas sp. ERG5 Contig74, whole genome shotgun sequence;
734983081; NZ_JSXI01000073.1
3181; Sphingomonas sp. ERG5 Contig80, whole genome shotgun sequence;
734983422; NZ_JSXI01000079.1
3182; Bacillus sp. 72 T409DRAFT_scf7180000000077_quiver.15_C, whole
genome shotgun sequence; 736160933; NZ_JQMI01000015.1
3183; Bacillus simplex BA2H3 scaffold2, whole genome shotgun sequence;
736214556; NZ_KN360955.1
3184; Dehalobacter sp. UNSWDEIB Contig_139, whole genome shotgun
sequence; 544905305; NZ_AUUR01000139.1
3185; Bacillus manliponensis strain JCM 15802 contig4, whole genome
shotgun sequence; 736629899; NZ_JOTN01000004.1
3186; Hyphomonas chukchiensis strain BH-BN04-4 contig6, whole genome
shotgun sequence; 736739493; NZ_AWFG01000063.1
3187; Bacillus vietnamensis steam HD-02, w hole genome shotgun sequence;
736762362; NZ_CCDN010000009.1
3188; Hyphomonas sp. CY54-11-8 contig4, whole genome shotgun sequence;
736764136; NZ_AWFD01000033.1
3189; Erythrobacter longus strain DSM 6997 contig9, whole genome shotgun
sequence; 736965849; NZ_JMIW01000009.1
3190; Caulobacter henricii strain CF287 EW90DRAFT_scaffold00023.23_C,
whole genome shotgun sequence; 737089868; NZ_JQJN01000025.1
3191; Caulobacter henricii strain YR570 EX13DRAFT_scaffold00022.22_C,
whole genome shotgun sequence; 737103862; NZ_JQJP01000023.1
3192; Calothrix sp. 336/3, complete genome; 821032128; NZ_CP011382.1
3193; Desulfobacter vibrioformis DSM 8776
Q366DRAFT_scaffold00036.35_C, whole genome shotgun sequence;
737257311; NZ_JQKJ01000036.1
3194; Actinokineospora spheciospongiae strain EG49 contig1268_1, whole
genome shotgun sequence; 737301464; NZ_AYXG01000139.1
3195; Brevundimonas sp. EAKA contig5, whole genome shotgun sequence;
737322991; NZ_JMQR01000005.1
3196; Brevundimonas sp. EAKA contig5, whole genome shotgun sequence;
737322991; NZ_JMQR01000005.1
3197; Brevundimonas sp. EAKA contig12, whole genome shotgun sequence;
737323704; NZ_JMQR01000012.1
3198; Bacillus firmus DS1 scaffold33, whole genome shotgun sequence;
737350949; NZ_APVL01000034.1
3199; Bacillus hemicellulosilyticus JCM 9152, whole genome shotgun
sequence; 737360192; NZ_BAUU01000008.1
3200; Edaphobacter aggregans DSM 19364
Q363DRAFT_scaffold00032.32_C, whole genome shotgun sequence;
737370143; NZ_JQKI01000040.1
3201; Bacillus sp. UNC322MFChir4.1 BR72DRAFT_scaffold00004.4, whole
genome shotgun sequence; 737456981; NZ_KN050811.1
3202; Haloglycomyces albus DSM 45210 HalalDRAFT_chromosome1.1_C,
whole genome shotgun sequence; 644043488; NZ_AZUQ01000001.1
3203; Hyphomonas oceanites SCH89 contig20, whole genome shotgun
sequence; 737567115; NZ_ARYL01000020.1
3204; Hyphomonas oceanites SCH89 contig59, whole genome shotgun
sequence; 737569369; NZ_ARYL01000059.1
3205; Halobacillus sp. BBL2006 cont444, whole genome shotgun sequence;
737576092; NZ_JRNX01000441.1
3206; Hyphomonas atlantica strain 22II1-22F38 contig10, whole genome
shotgun sequence; 737577234; NZ_AWFH01000002.1
3207; Hyphomonas atlantica strain 22II1-22F38 contig28, whole genome
shotgun sequence; 737580759; NZ_AWFH01000021.1
3208; Hyphomonas jannaschiana VP2 contig2, whole genome shotgun
sequence; 737608363; NZ_ARYJ01000002.1
3209; Bacillus akibai JCM 9157, whole genome shotgun sequence;
737696658; NZ_BAUV01000025.1
3210; Frankia sp. CcI6 CcI6DRAFT_scaffold_16.17, whole genome shotgun
sequence; 564016690; NZ_AYTZ01000017.1
3211; Frankia sp. Thr ThrDRAFTscaffold_48.49, whole genome shotgun
sequence; 602261491; JENI01000049.1
3212; Frankia sp. Thr ThrDRAFT_scaffold_28.29, whole genome shotgun
sequence; 602262270; JENI01000029.1
3213; Frankia sp. CcI6 CcI6DRAFT_scaffold_16.17, whole genome shotgun
sequence; 564016690; NZ_AYTZ01000017.1
3214; [Leptolyngbya] sp. JSC-1 Osccy1DRAFT_CYJSC1_DRAF_scaffold00069.1,
whole genome shotgun sequence; 738050739; NZ_KL662191.1
3215; Lysobacter daejeonensis GH1-9 contig23, whole genome shotgun
sequence; 738180952; NZ_AVPU01000014.1
3216; Myxosarcina sp. GI1 contig_5, whole genome shotgun sequence;
738529722; NZ_JRFE01000006.1
3217; Novosphingobium resinovorum stain KF1 contig000002, whole
genome shotgun sequence; 738613868; NZ_JFYZ01000002.1
3218; Novosphingobium resinovorum stain KF1 contig000008, whole
genome shotgun sequence; 738615271; NZ_JFYZ01000008.1
3219; Novosphingobium resinovorum stain KF1 contig000015, whole
genome shotgun sequence; 738617000; NZ_JFYZ01000015.1
3220; Paenibacillus sp. FSL H7-689 Contig015, whole genome shotgun
sequence; 738716739; NZ_ASPU01000015.1
3221; Paenibacillus wynnii strain DSM 18334 unitig_2, whole genome
shotgun sequence; 738760618; NZ_JQCR01000002.1
3222; Pandoraea sp. SD6-2 scaffold29, whole genome shotgun sequence;
505733815; NZ_KB944444.1
3223; Paenibacillus sp. FSL R7-269 Contig022, whole genome shotgun
sequence; 738803633; NZ_ASPS01000022.1
3224; Paenibacillus taiwanensis DSM 18679 H509DRAFT_scaffold00010.10_C,
whole genome shotgun sequence; 655095554; NZ_AULE01000001.1
3225; Paenibacillus sp. FSL R7-277 Contig088, whole genome shotgun
sequence; 738841140; NZ_ASPX01000088.1
3226; Prevotella oryzae DSM 17970 XylorDRAFT_XOA.1, whole genome
shotgun sequence; 738999090; NZ_KK073873.1
3227; Promicromonospora kroppenstedtii DSM 19349 ProkrDRAFT_PKA.71,
whole genome shotgun sequence; 739097522; NZ_KI911740.1
3228; Pseudonocardia acaciae DSM 45401 N912DRAFT_scaffold00002.2_C,
whole genome shotgun sequence; 655569633; NZ_JIAI01000002.1
3229; Rhodanobacter sp. 115 contig437, whole genome shotgun sequence;
389759651; NZ_AJXS01000437.1
3230; Rhodococcus fascians A21d2 contig10, whole genome shotgun
sequence; 739287390; NZ_JMFA01000010.1
3231; Ruminococcus albus 8 contig00035, whole genome shotgun sequence;
325680876; NZ_ADKM02000123.1
3232; Rubellimicrobium mesophilum DSM 19309 scaffold23, whole genome
shotgun sequence; 739419616; NZ_KK088564.1
3233; Rothia aeria F0184 Scaffold136, whole genome shotgun sequence;
553804563; NZ_KI518028.1
3234; Amycolatopsis orientalis DSM 40040 = KCTC 9412 contig_32, whole
genome shotgun sequence; 499136900; NZ_ASJB01000015.1
3235; Amycolatopsis sp. MJM2582 contig00007, whole genome shotgun
sequence; 739487309; NZ_JPLW01000007.1
3236; Sphingobium chlorophenolicum strain NBRC 16172 contig000025,
whole genome shotgun sequence; 739594477; NZ_JFHR01000025.1
3237; Sphingobium chlorophenolicum strain NBRC 16172 contig000062,
whole genome shotgun sequence; 739598481; NZ_JFHR01000062.1
3238; Sphingobium herbicidovorans NBRC 16415 contig000028, whole
genome shotgun sequence; 739610197; NZ_JFZA02000028.1
3239; Sphingobium sp. ba1 seq0028, whole genome shotgun sequence;
739622900; NZ_JPPQ01000069.1
3240; Sphingobium sp. ba1 seq0028, whole genome shotgun sequence;
739622900; NZ_JPPQ01000069.1
3241; Sphingomonas paucimobilis strain EPA505 contig000016, whole
genome shotgun sequence; 739629085; NZ_JFYY01000016.1
3242; Sphingobium japonicum BiD32, whole genome shotgun sequence;
494022722; NZ_CAVK010000217.1
3243; Sphingobium yanoikuyae strain B1 scaffold1, whole genome shotgun
sequence; 739650776; NZ_KL662193.1
3244; Sphingobium yanoikuyae strain B1 scaffold28, whole genome shotgun
sequence; 739656825; NZ_KL662220.1
3245; Sphingopyxis sp. LC81 contig24, whole genome shotgun sequence;
739659070; NZ_JNFD01000017.1
3246; Sphingobium yanoikuyae strain B1 contig000019, whole genome
shotgun sequence; 739665456; NZ_JGVR01000019.1
3247; Sphingomonas wittichii strain YR128 EX04DRAFT_scaffold00050.50_C,
whole genome shotgun sequence; 739674258; NZ_JQMC01000050.1
3248; Sphingopyxis fribergensis strain Kp5.2, complete genome; 749188513;
NZ_CP009122.1
3249; Sphingopyxis sp. LC363 contig30, whole genome shotgun sequence;
739701660; NZ_JNFC01000024.1
3250; Sphingopyxis sp. LC363 contig36, whole genome shotgun sequence;
739702045; NZ_JNFC01000030.1
3251; Sphingopyxis sp. LC363 contig5, whole genome shotgun sequence;
739702995; NZ_JNFC01000045.1
3252; Spirillospora albida strain NRRL B-3350 contig1.1, whole genome
shotgun sequence; 663122276; NZ_JOFJ01000001.1
3253; Sphingomonas sp. UNC305MFCol5.2 BR78DRAFT_scaffold00001.1_C,
whole genome shotgun sequence; 659889283; NZ_JOOE01000001.1
3254; Streptococcus salivarius strain NU10 contig_11, whole genome shotgun
sequence; 739748927; NZ_JJMT01000011.1
3255; Streptomyces katrae strain NRRL B-16271 contig33.1, whole genome
shotgun sequence; 663300513; NZ_JNZY01000033.1
3256; Streptomyces avermitilis MA-4680 = NBRC 14893, complete genome;
162960844; NC_003155.4
3257; Streptomyces avermitilis MA-4680 = NBRC 14893, complete genome;
162960844; NC_003155.4
3258; Streptomyces aurantiacus JA 4570 Seq17, whole genome shotgun
sequence; 514916021; NZ_AOPZ01000017.1
3259; Streptomyces griseus subsp. griseus strain NRRL WC-3645 contig39.1,
whole genome shotgun sequence; 739830131; NZ_JOJE01000039.1
3260; Streptomyces griseus subsp. griseus strain NRRL WC-3645 contig40.1,
whole genome shotgun sequence; 739830264; NZ_JOJE01000040.1
3261; Streptomyces aureocirculatus strain NRRL ISP-5386 contig11.1, whole
genome shotgun sequence; 664013282; NZ_JOAP01000011.1
3262; Streptomyces scabiei strain NCPPB 4086 scf_65433_365.1, whole
genome shotgun sequence; 739854483; NZ_KL997447.1
3263; Streptomyces sp. ATexAB-D23 B082DRAFT_scaffold_0.1, whole
genome shotgun sequence; 483975550; NZ_KB892001.1
3264; Streptomyces lavendulae strain Fujisawa #8006 contig417.1, whole
genome shotgun sequence; 662043624; NZ_JNXL01000469.1
3265; Streptomyces sp. DpondAA-B6 K379DRAFT_scaffold00015.15_C,
whole genome shotgun sequence; 654993549; NZ_AZVE01000016.1
3266; Streptomyces sclerotialus strain NRRL B-2317 contig7.1, whole genome
shotgun sequence; 664034500; NZ_JODX01000007.1
3267; Streptomyces olindensis strain DAUFPE 5622 103, whole genome
shotgun sequence; 739918964; NZ_JJOH01000097.1
3268; Streptomyces pristinaespiralis ATCC 25486 chromosome, whole
genome shotgun sequence; 297189896; NZ_CM000950.1
3269; Streptomyces sp. CNH099 B121DRAFT_scaffold_16.17_C, whole
genome shotgun sequence; 654239557; NZ_AZWL01000018.1
3270; Streptomyces sp. MspMP-M5 B073DRAFT_scaffold_27.28, whole
genome shotgun sequence; 483974021; NZ_KB891893.1
3271; Streptomyces sp. NRRL S-1813 contig13.1, whole genome shotgun
sequence; 664466568; NZ_JOHB01000013.1
3272; Streptomyces sp. NRRL S-87 contig69.1, whole genome shotgun
sequence; 663169513; NZ_JO
3273; Streptomyces sp. PRh5 contig001, whole genome shotgun sequence;
740097110; NZ_JABQ01000001.1
3274; Thioclava dalianensis strain DLFJ1-1 contig2, whole genome shotgun
sequence; 740220529; NZ_JHEH01000002.1
3275; Tolypothrix bouteillei VB521301 scaffold_1, whole genome shotgun
sequence; 910242069; NZ_JHEG02000048.1
3276; Thioclava indica strain DT23-4 contig29, whole genome shotgun
sequence; 740292158; NZ_AUNB01000028.1
3277; Streptomyces albulus strain NK660, complete genome; 754221033;
NZ_CP007574.1
3278; Paenibacillus sp. FSL H7-0357, complete genome; 749299172;
NZ_CP009241.1
3279; Paenibacillus stellifer strain DSM 14472, complete genome; 753871514;
NZ_CP009286.1
3280; Burkholderia pseudomallei 1258a Contig0089, whole genome shotgun
sequence; 418540998; NZ_AHJB01000089.1
3281; Burkholderia pseudomallei ABCPW 91 scaffold1, whole genome
shotgun sequence; 740941050; NZ_KN323016.1
3282; Burkholderia pseudomallei strain MSHR4018 scaffold2, whole genome
shotgun sequence; 740942724; NZ_KN323080.1
3283; Burkholderia pseudomallei MSHR1357 scaffold1, whole genome
shotgun sequence; 740944663; NZ_KN323054.1
3284; Burkholderia pseudomallei ABCPW 30 scaffold1, whole genome
shotgun sequence; 740947478; NZ_KN323024.1
3285; Burkholderia pseudomallei MSHR465J scaffold1, whole genome
shotgun sequence; 740992312; NZ_KN322994.1
3286; Burkholderia pseudomallei TSV32 Y025.contig-100_19, whole genome
shotgun sequence; 740951623; NZ_JQHT01000093.1
3287; Burkholderia pseudomallei MSHR2990 scaffold2, whole genome
shotgun sequence; 740957131; NZ_KN323051.1
3288; Burkholderia sp. ABCPW 111 X946.contig-100_0, whole genome
shotgun sequence; 740958729; NZ_JPWT01000001.1
3289; Burkholderia pseudomallei MSHR1000 scaffold1, whole genome
shotgun sequence; 740963677; NZ_KN323065.1
3290; Burkholderia pseudomallei strain BDM scaffold1, whole genome
shotgun sequence; 740964046; NZ_KN150935.1
3291; Burkholderia pseudomallei strain BEG scaffold1, whole genome
shotgun sequence; 740978899; NZ_KN150957.1
3292; Burkholderia pseudomallei strain BDZ scaffold40, whole genome
shotgun sequence; 740989169; NZ_KN150904.1
3293; Burkholderia pseudomallei MSHR4377 scaffold1, whole genome
shotgun sequence; 740998359; NZ_KN322996.1
3294; Burkholderia pseudomallei strain BGH scaffold1, whole genome
shotgun sequence; 741001323; NZ_KN150943.1
3295; Burkholderia pseudomallei MSHR7343 X962.contig-100_14, whole
genome shotgun sequence; 741003124; NZ_JQDM01000047.1
3296; Burkholderia pseudomallei strain PFGE_B T6 scaffold1, whole genome
shotgun sequence; 741007242; NZ_KN150983.1
3297; Burkholderia pseudomallei MSHR3965 chromosome 1 sequence;
752520733; NZ_CP009153.1
3298; Burkholderia pseudomallei MSHR5492 X992.contig-100_0, whole
genome shotgun sequence; 741015160; NZ_JQDO01000001.1
3299; Burkholderia oklahomensis strain EO147 chromosome 1, complete
sequence; 752612400; NZ_CP008726.1
3300; Burkholderia oklahomensis strain EO147 chromosome 1, complete
sequence; 752612400; NZ_CP008726.1
3301; Cupriavidus sp. IDO NODE_7, whole genome shotgun sequence;
742878908; NZ_JWMA01000006.1
3302; Cupriavidus sp. IDO NODE_7, whole genome shotgun sequence;
742878908; NZ_JWMA01000006.1
3303; Escherichia coli strain EC2_3 Contig93, whole genome shotgun
sequence; 742921760; NZ_JWKL01000093.1
3304; Brevundimonas nasdae strain TPW30 Contig_11, whole genome
shotgun sequence; 746187486; NZ_JWSY01000011.1
3305; Brevundimonas nasdae strain TPW30 Contig_13, whole genome
shotgun sequence; 746187665; NZ_JWSY01000013.1
3306; Paenibacillus polymyxa strain DSM 365 Contig001, whole genome
shotgun sequence; 746220937; NZ_JMIQ01000001.1
3307; Paenibacillus polymyxa strain CF05 genome; 746228615;
NZ_CP009909.1
3308; Novosphingobium malaysiense strain MUSC 273 Contig11, whole
genome shotgun sequence; 746242072; NZ_JTDI01000011.1
3309; Paenibacillus sp. IHB B 3415 contig_069, whole genome shotgun
sequence; 746258261; NZ_JUEI01000069.1
3310; Novosphingobium subterraneum strain DSM 12447
NJ75_contig000013, whole genome shotgun sequence; 746288194;
NZ_JRVC01000013.1
3311; Pandoraea sputorum strain DSM 21091, complete genome; 749204399;
NZ_CP010431.1
3312; Xanthomonas cannabis pv. cannabis strain NCPPB 3753 contig_67,
whole genome shotgun sequence; 746366822; NZ_JSZF01000067.1
3313; Xanthomonas arboricola pv. pruni MAFF 301420 strain MAFF301420,
whole genome shotgun sequence; 759376814; NZ_BAVC01000017.1
3314; Xanthomonas arboricola pv. celebensis strain NCPPB 1630
scf_49108_10.1, whole genome shotgun sequence; 746486416;
NZ_KL638873.1
3315; Xanthomonas arboricola pv. celebensis strain NCPPB 1832
scf_23466_141.1, whole genome shotgun sequence; 746494072;
NZ_KL638866.1
3316; Xanthomonas cannabis pv. cannabis strain NCPPB 2877 contig_94,
whole genome shotgun sequence; 746532813; NZ_JSZE01000094.1
3317; Sphingopyxis fribergensis strain Kp5.2, complete genome; 749188513;
NZ_CP009122.1
3318; Sphingopyxis fribergensis strain Kp5.2, complete genome; 749188513;
NZ_CP009122.1
3319; Sphingopyxis fribergensis strain Kp5.2, complete genome; 749188513;
NZ_CP009122.1
3320; Xanthomonas phaseoli pv. phaseoli strain NCPPB 557
scf_22337_104.contig 1, whole genome shotgun sequence; 821373081;
NZ_JWTE02000036.1
3321; Corynebacterium minutissimum strain ATCC 23348
Ordered Contig 015, whole genome shotgun sequence; 746717390;
NZ_JSEF01000015.1
3322; Hassallia byssoidea VB512170 scaffold_0, whole genome shotgun
sequence; 748181452; NZ_JTCM01000043.1
3323; Xanthomonas arboricola pv. corylina str. NCCB 100457 Contig50,
whole genome shotgun sequence; 507418017; NZ_APMC02000050.1
3324; Paenibacillus sonchi X19-5 S5_contig01138, whole genome shotgun
sequence; 484099183; NZ_AJTY01001072.1
3325; Pedobacter sp. BAL39 1103467000492, whole genome shotgun
sequence; 149277373; NZ_ABCM01000005.1
3326; Paenibacillus sp. FSL R7-0273, complete genome; 749302091;
NZ_CP009283.1
3327; Amycolatopsis decaplanina DSM 44594 Contig0055, whole genome
shotgun sequence; 458848256; NZ_AOHO01000055.1
3328; Rhodanobacter thiooxydans LCS2 contig057, whole genome shotgun
sequence; 389809081; NZ_AJXW01000057.1
3329; Bacillus sp. REN51N contig_2, whole genome shotgun sequence;
748816024; NZ_JXAB01000002.1
3330; Paenibacillus polymyxa strain Sb3-1, complete genome; 749204146;
NZ_CP010268.1
3331; Citrobacter pasteurii strain CIP 55.13, whole genome shotgun sequence;
749611130; NZ_CDHL01000044.1
3332; Klebsiella pneumoniae CCHB01000016, whole genome shotgun
sequence; 749639368; NZ_CCHB01000016.1
3333; Streptomonospora alba strain YIM 90003 contig_9, whole genome
shotgun sequence; 749673329; NZ_JROO01000009.1
3334; Actinobaculum sp. oral taxon 183 str. F0552 Scaffold1, whole genome
shotgun sequence; 545327174; NZ_KE951406.1
3335; Actinobaculum sp. oral taxon 183 str. F0552 Scaffold15, whole genome
shotgun sequence; 545327527; NZ_KE951412.1
3336; Rubidibacter lacunae KORDI 51-2 KR51_contig00121, whole genome
shotgun sequence; 550281965; NZ_ASSJ01000070.1
3337; Nocardiopsis chromatogenes YIM 90109 contig_93, whole genome
shotgun sequence; 484026206; NZ_ANBH01000093.1
3338; Streptomyces auratus AGR0001 Scaffold1, whole genome shotgun
sequence; 398790069; NZ_JH725387.1
3339; Gorillibacterium massiliense strain G5, whole genome shotgun
sequence; 750677319; NZ_CBQR020000171.1
3340; Mesorhizobium sp. ORS3324, whole genome shotgun sequence;
751265275; NZ_CCMY01000220.1
3341; Mesorhizobium plurifarium, whole genome shotgun sequence;
751280166; NZ_CCNB01000034.1
3342; Mesorhizobium sp. SOD10, whole genome shotgun sequence;
751285871; NZ_CCNA01000001.1
3343; Mesorhizobium plurifarium, whole genome shotgun sequence;
751292755; NZ_CCNE01000004.1
3344; Mesorhizobium plurifarium, whole genome shotgun sequence;
751299847; NZ_CCMZ01000015.1
3345; Tolypothrix campylonemoides VB511288 scaffold_0, whole genome
shotgun sequence; 751565075; NZ_JXCB01000004.1
3346; Jeotgalibacillus campisalis strain SF-57 contig00001, whole genome
shotgun sequence; 751586078; NZ_JXRR01000001.1
3347; Cohnella kolymensis strain VKM B-2846 B2846_22, whole genome
shotgun sequence; 751596254; NZ_JXAL01000022.1
3348; Jeotgalibacillus soli strain P9 contig00009, whole genome shotgun
sequence; 751619763; NZ_JXRP01000009.1
3349; Burkholderia pseudomallei MSHR4000 scaffold1, whole genome
shotgun sequence; 752517538; NZ_KN323041.1
3350; Burkholderia pseudomallei MSHR4303 scaffold1, whole genome
shotgun sequence; 752519380; NZ_KN323039.1
3351; Burkholderia pseudomallei MSHR4300 scaffold1, whole genome
shotgun sequence; 752522535; NZ_KN322998.1
3352; Burkholderia pseudomallei MSHR4032 scaffold1, whole genome
shotgun sequence; 752526735; NZ_KN323008.1
3353; Geobacter uraniireducens Rf4, complete genome; 148262085;
NC_009483.1
3354; Saccharothrix espanaensis DSM 44229 complete genome; 433601838;
NC_019673.1
3355; Mycobacterium sinense strain JDM601, complete genome; 333988640;
NC_015576.1
3356; Sphingomonas wittichii RW1, complete genome; 148552929;
NC_009511.1
3357; Sphingopyxis alaskensis RB2256, complete genome; 103485498;
NC_008048.1
3358; Sphingopyxis alaskensis RB2256, complete genome; 103485498;
NC_008048.1
3359; Synechococcus sp. PCC 6312, complete genome; 427711179;
NC_019680.1
3360; Caulobacter sp. K31, complete genome; 167643973; NC_010338.1
3361; Tistrella mobilis KA081020-065 plasmid pTM1, complete sequence;
442559580; NC_017957.2
3362; Stackebrandtia nassauensis DSM 44728, complete genome; 291297538;
NC_013947.1
3363; Magnetospirillum gryphiswaldense MSR-1 v2, complete genome;
568144401; NC_023065.1
3364; Asticcacaulis excentricus CB 48 chromosome 1, complete sequence;
315497051; NC_014816.1
3365; Emticicia oligotrophica DSM 17448, complete genome; 408671769;
NC_018748.1
3366; Clostridium beijerinckii strain NCIMB 14988 genome; 754484184;
NZ_CP010086.1
3367; Desulfocapsa sulfexigens DSM 10523, complete genome; 451945650;
NC_020304.1
3368; Gallionella capsiferriformans ES-2, complete genome; 302877245;
NC_014394.1
3369; Paenibacillus sp. FSL P4-0081, complete genome; 754777894;
NZ_CP009280.1
3370; Streptomyces sp. NBRC 110027, whole genome shotgun sequence;
754788309; NZ_BBNO01000002.1
3371; Streptomyces sp. NBRC 110027, whole genome shotgun sequence;
754796661; NZ_BBNO01000008.1
3372; Paenibacillus sp. FSL R7-0331, complete genome; 754821094;
NZ_CP009284.1
3373; Paenibacillus camerounensis strain G4, whole genome shotgun
sequence; 754841195; NZ_CCDG010000069.1
3374; Paenibacillus borealis strain DSM 13188, complete genome;
754859657; NZ_CP009285.1
3375; Paenibacillus sp. FSL R5-0912, complete genome; 754884871;
NZ_CP009282.1
3376; Legionella pneumophila serogroup 1 strain TUM 13948, whole genome
shotgun sequence; 754875479; NZ_BAYQ01000013.1
3377; Nocardiopsis sp. TP-A0876 strain NBRC 110039, whole genome
shotgun sequence; 754924215; NZ_BAZE01000001.1
3378; Streptacidiphilus neutrinimicus strain NBRC 100921, whole genome
shotgun sequence; 755016073; NZ_BBPO01000030.1
3379; Sanguibacter keddieii DSM 10542, complete genome; 269793358;
NC_013521.1
3380; Streptacidiphilus jiangxiensis strain NBRC 100920, whole genome
shotgun sequence; 755108320; NZ_BBPN01000056.1
3381; Mesorhizobium sp. ORS3359, whole genome shotgun sequence;
756828038; NZ_CCNC01000143.1
3382; Streptomyces rimosus strain R6-500MV9-R8 contig021, whole genome
shotgun sequence; 757577710; NZ_JMGY01000021.1
3383; Burkholderia pseudomallei Bp22 chromosome I, whole genome shotgun
sequence; 485065055; NZ_CM001156.1
3384; Bacillus mycoides strain BHP DJ93.Contig42, whole genome shotgun
sequence; 757763573; NZ_JMQC01000008.1
3385; Aneurinibacillus migulanus strain NCTC 7096 contig_153, whole
genome shotgun sequence; 759007555; NZ_JYBO01000079.1
3386; Xanthomonas arboricola pv. pruni strain Xap33 contig_176, whole
genome shotgun sequence; 759358038; NZ_JHUQ01000175.1
3387; Sphingobium sp. Ant17 Contig_45, whole genome shotgun sequence;
759429528; NZ_JEMV01000036.1
3388; Sphingobium sp. Ant17 Contig_90, whole genome shotgun sequence;
759431957; NZ_JEMV01000094.1
3389; Bifidobacterium callitrichos DSM 23973 contig4, whole genome
shotgun sequence; 759443001; NZ_JDUV01000004.1
3390; Streptomyces sp. NRRL F-5123 contig24.1, whole genome shotgun
sequence; 671535174; NZ_JOHY01000024.1
3391; Streptomyces vinaceus strain NRRL ISP-5257 contig5.1, whole genome
shotgun sequence; 759527818; NZ_JNYP01000005.1
3392; Burkholderia pseudomallei MSHR1153 chromosome 1, complete
sequence; 759555751; NZ_CP009271.1
3393; Burkholderia thailandensis MSMB43 Scaffold3, whole genome shotgun
sequence; 424903876; NZ_JH692063.1
3394; Pseudomonas sp. HMP271 Pseudomonas_HMP271_contig_7, whole
genome shotgun sequence; 759578528; NZ_JMFZ01000007.1
3395; Stenotrophomonas maltophilia strain B418 Contig_4_, whole genome
shotgun sequence; 759679095; NZ_JSXG01000004.1
3396; Kitasatospora sp. MBT66 scaffold3, whole genome shotgun sequence;
759755931; NZ_JAIY01000003.1
3397; Streptomyces bingchenggensis BCW-1, complete genome; 374982757;
NC_016582.1
3398; Streptomyces glaucescens strain GLA.O, complete genome; 759802587;
NZ_CP009438.1
3399; Streptomyces glaucescens strain GLA.O, complete genome; 759802587;
NZ_CP009438.1
3400; Actinomyces israelii DSM 43320 O145DRAFT_scaffold00014.14_C,
whole genome shotgun sequence; 759875025; NZ_JONS01000016.1
3401; Rubrivivax gelatinosus IL144 DNA, complete genome; 383755859;
NC_017075.1
3402; Clostridium butyricum strain HM-68 Contig83, whole genome shotgun
sequence; 760273878; NZ_JXBT01000001.1
3403; Novosphingobium sp. P6W scaffold3, whole genome shotgun sequence;
763092879; NZ_JXZE01000003.1
3404; Streptomyces fulvissimus DSM 40593, complete genome; 488607535;
NC_021177.1
3405; Novosphingobium sp. P6W scaffold9, whole genome shotgun sequence;
763095630; NZ_JXZE01000009.1
3406; Bifidobacterium reuteri DSM 23975 contig4, whole genome shotgun
sequence; 763216595; NZ_JDUW01000004.1
3407; Sphingomonas hengshuiensis strain WHSC-8, complete genome;
764364074; NZ_CP010836.1
3408; Sphingomonas hengshuiensis strain WHSC-8, complete genome;
764364074; NZ_CP010836.1
3409; Burkholderia pseudomallei strain QCMRI_BP13 Contig_7, whole
genome shotgun sequence; 764427571; NZ_JYBH01000021.1
3410; Streptomyces natalensis ATCC 27448 Scaffold_33, whole genome
shotgun sequence; 764439507; NZ_JRKI01000027.1
3411; Streptomyces griseus strain S4-7 contig113, whole genome shotgun
sequence; 764464761; NZ_JYBE01000113.1
3412; Streptomyces cyaneogriseus subsp. noncyanogenus strain NMWT 1,
complete genome; 764487836; NZ_CP010849.1
3413; Bacillus subtilis subsp. spizizenii RFWG1A4 contig00010, whole
genome shotgun sequence; 764657375; NZ_AJHM01000010.1
3414; Mastigocladus laminosus UU774 scaffold_22, whole genome shotgun
sequence; 764671177; NZ_JXIJ01000139.1
3415; Bacillus subtilis subsp. spizizenii RFWG5B15 contig00010, whole
genome shotgun sequence; 764677272; NZ_AJHO01000010.1
3416; Streptomyces iranensis genome assembly Siranensis, scaffold
SCAF00002; 765016627; NZ_LK022849.1
3417; Risungbinella massiliensis strain GD1, whole genome shotgun sequence;
765315585; NZ_LN812103.1
3418; Risungbinella massiliensis strain GD1, whole genome shotgun sequence;
765315585; NZ_LN812103.1
3419; Paenibacillus terrae strain NRRL B-30644 contig00007, whole genome
shotgun sequence; 765319397; NZ_JTHP01000007.1
3420; Sphingobium sp. YBL2, complete genome; 765344939;
NZ_CP010954.1
3421; Sphingobium sp. YBL2, complete genome; 765344939;
NZ_CP010954.1
3422; Streptococcus suis strain LS5J, whole genome shotgun sequence;
765394696; NZ_CEEZ01000028.1
3423; Bacillus mycoides strain 11kri323 LG56_082, whole genome shotgun
sequence; 765533368; NZ_JYCJ01000082.1
3424; Streptococcus suis strain LS8F, whole genome shotgun sequence;
766589647; NZ_CEHJ01000007.1
3425; Streptococcus suis strain LS8I, whole genome shotgun sequence;
766595491; NZ_CEHM01000004.1
3426; Paenibacillus polymyxa strain NRRL B-30509 contig00003, whole
genome shotgun sequence; 766607514; NZ_JTHO01000003.1
3427; Thalassospira sp. HJ NODE_2, whole genome shotgun sequence;
766668420; NZ_JYII01000010.1
3428; Paenibacillus sp. IHBB 10380, complete genome; 767005659;
NZ_CP010976.1
3429; Frankia sp. CpI1-S FF36_scaffold_9.10, whole genome shotgun
sequence; 768715243; NZ_JYFN01000010.1
3430; Streptococcus suis strain B28P, whole genome shotgun sequence;
769231516; NZ_CDTB01000010.1
3431; Lechevalieria aerocolonigenes strain NRRL B-16140 contig11.3, whole
genome shotgun sequence; 772744565; NZ_JYJG01000059.1
3432; Streptomyces sp. NRRL F-4428 contig40.2, whole genome shotgun
sequence; 772774737; NZ_JYJI01000131.1
3433; Bacterium endosymbiont of Mortierella elongata FMR23-6, whole
genome shotgun sequence; 779889750; NZ_DF850521.1
3434; Bacterium endosymbiont of Mortierella elongata FMR23-6, whole
genome shotgun sequence; 779889750; NZ_DF850521.1
3435; Streptomyces sp. FxanaA7 F611DRAFT_scaffold00041.41_C, whole
genome shotgun sequence; 780340655; NZ_LACL01000054.1
3436; Burkholderia oklahomensis C6786 chromosome I, complete sequence;
780352952; NZ_CP009555.1
3437; Burkholderia pseudomallei MSHR2543 chromosome I, complete
sequence; 782642065; NZ_CP009478.1
3438; Burkholderia thailandensis 34 chromosome 1, complete sequence;
782674607; NZ_CP010017.1
3439; Streptomyces rubellomurinus strain ATCC 31215 contig-63, whole
genome shotgun sequence; 783211546; NZ_JZKH01000064.1
3440; Burkholderia pseudomallei strain MSHR5107 Contig_3, whole genome
shotgun sequence; 785595141; NZ_JZXP01000013.1
3441; Elstera litoralis strain Dia-1 c21, whole genome shotgun sequence;
788026242; NZ_LAJY01000021.1
3442; Frankia sp. DC12 FraDC12DRAFT_scaffold1.1, whole genome
shotgun sequence; 797224947; NZ_KQ031391.1
3443; Sphingomonas sp. SRS2 contig40, whole genome shotgun sequence;
806905234; NZ_LARW01000040.1
3444; Bacillus sp. UMTAT18 contig00001 1, whole genome shotgun
sequence; 806951735; NZ_JSFD01000011.1
3445; Paenibacillus wulumuqiensis strain Y24 Scaffold4, whole genome
shotgun sequence; 808051893; NZ_KQ040793.1
3446; Bacillus endophyticus strain Hbe603, complete genome; 890672806;
NZ_CP011974.1
3447; Paenibacillus algorifonticola strain XJ259 Scaffold20_1, whole genome
shotgun sequence; 808072221; NZ_LAQO01000025.1
3448; Streptomyces sp. MBT28 contig_50, whole genome shotgun sequence;
808090008; NZ_LARV01000050.1
3449; Mycobacterium sp. UM_Kg27 contig000002, whole genome shotgun
sequence; 809025315; NZ_JRMM01000002.1
3450; Mycobacterium sp. UM_Kg1 contig000164, whole genome shotgun
sequence; 809073490; NZ_JRMK01000164.1
3451; Xanthomonas campestris strain 17, complete genome; 810489403;
NZ_CP011256.1
3452; Spirosoma radiotolerans strain DG5A, complete genome; 817524426;
NZ_CP010429.1
3453; Allosalinactinospora lopnorensis strain CA15-2 contig00044, whole
genome shotgun sequence; 815863894; NZ_LAJC01000044.1
3454; Bacillus sp. SA1-12 scf7180000003378, whole genome shotgun
sequence; 817541164; NZ_LATZ01000026.1
3455; Streptomyces xiamenensis strain 318, complete genome; 921170702;
NZ_CP009922.2
3456; Streptomyces xiamenensis strain 318, complete genome; 921170702;
NZ_CP009922.2
3457; Altererythrobacter atlanticus strain 26DY36, complete genome;
927872504; NZ_CP011452.2
3458; Streptomyces lydicus A02, complete genome; 822214995;
NZ_CP007699.1
3459; Streptomyces lydicus A02, complete genome; 822214995;
NZ_CP007699.1
3460; Streptomyces lydicus A02, complete genome; 822214995;
NZ_CP007699.1
3461; Bacillus cereus strain B4147 NODE_5, whole genome shotgun
sequence; 822530609; NZ_LCYN01000004.1
3462; Xanthomonas pisi DSM 18956 Contig_28, whole genome shotgun
sequence; 822535978; NZ_JPLE01000028.1
3463; Erythrobacter luteus strain KA37 contig1, whole genome shotgun
sequence; 822631216; NZ_LBHB01000001.1
3464; Erythrobacter marinus strain KCTC 23554 KCTC23554_C3, whole
genome shotgun sequence; 829088381; NZ_LDCP01000003.1
3465; Streptomyces leeuwenhoekii strain C34(2013) c34_sequence_0041,
whole genome shotgun sequence; 657295264; NZ_AZSD01000040.1
3466; Streptomyces leeuwenhoekii strain C34(2013) c34_sequence_0012,
whole genome shotgun sequence; 657294764; NZ_AZSD01000012.1
3467; Xanthomonas arboricola strain CFBP 7634 Xarjug-CFBP7634-G11,
whole genome shotgun sequence; 825139250; NZ_JZEH01000001.1
3468; Xanthomonas arboricola strain CFBP 7651 Xarjug-CFBP7651-G11,
whole genome shotgun sequence; 825156557; NZ_JZEI01000001.1
3469; Luteimonas sp. FCS-9 scf7180000000225, whole genome shotgun
sequence; 825314716; NZ_LASZ01000002.1
3470; Luteimonas sp. FCS-9 scf7180000000226, whole genome shotgun
sequence; 825314728; NZ_LASZ01000003.1
3471; Streptomyces sp. KE1 Contig11, whole genome shotgun sequence;
825353621; NZ_LAYX01000011.1
3472; Frankia coriariae strain BMG5.1 scaffold41.42, whole genome shotgun
sequence; 827465632; NZ_JWIO01000042.1
3473; Erythrobacter marinus strain KCTC 23554 KCTC23554_C3, whole
genome shotgun sequence; 829088381; NZ_LDCP01000003.1
3474; Alistipes sp. ZOR0009 L990_140, whole genome shotgun sequence;
835319962; NZ_JTLD01000119.1
3475; Streptomyces sp. M10 Scaffold2, whole genome shotgun sequence;
835355240; NZ_KN549147.1
3476; Bacillus aryabhattai strain T61 Scaffold1, whole genome shotgun
sequence; 836596561; NZ_KQ087173.1
3477; Croceicoccus naphthovorans strain PQ-2, complete genome;
836676868; NZ_CP011770.1
3478; Paenibacillus sp. TCA20, whole genome shotgun sequence; 843088522;
NZ_BBIW01000001.1
3479; Bacillus circulans strain RIT379 contig11, whole genome shotgun
sequence; 844809159; NZ_LDPH01000011.1
3480; Ornithinibacillus californiensis strain DSM 16628 contig_22, whole
genome shotgun sequence; 849059098; NZ_LDUE01000022.1
3481; Bacillus pseudalcaliphilus strain DSM 8725 super11, whole genome
shotgun sequence; 849078078; NZ_LFJO01000006.1
3482; Bacillus aryabhattai strain LK25 16, whole genome shotgun sequence;
850356871; NZ_LDWN01000016.1
3483; Methanobacterium sp. SMA-27 DL91DRAFT_unitig_0_quiver.1_C,
whole genome shotgun sequence; 851351157; NZ_JQLY01000001.1
3484; Cellulomonas sp. A375-1 contig_129, whole genome shotgun sequence;
856992287; NZ_LFKW01000127.1
3485; Bacillus cereus strain RIMV BC 126 212, whole genome shotgun
sequence; 872696015; NZ_LABO01000035.1
3486; Streptomyces leeuwenhoekii strain C58 contig69, whole genome
shotgun sequence; 873282617; NZ_LFEH01000068.1
3487; Streptomyces leeuwenhoekii strain C58 contig126, whole genome
shotgun sequence; 873282818; NZ_LFEH01000123.1
3488; Sphingomonas sp. MEA3-1 contig00021, whole genome shotgun
sequence; 873296042; NZ_LECE01000021.1
3489; Sphingomonas sp. MEA3-1 contig00040, whole genome shotgun
sequence; 873296160; NZ_LECE01000040.1
3490; Sphingomonas sp. MEA3-1 contig00071, whole genome shotgun
sequence; 873296295; NZ_LECE01000071.1
3491; Bacillus sp. 220_BSPC 1447_75439_1072255, whole genome shotgun
sequence; 880954155; NZ_JVPL01000109.1
3492; Bacillus sp. 522_BSPC 2470_72498_1083579_594_{——}. . ._522_, whole
genome shotgun sequence; 880997761; NZ_JVDT01000118.1
3493; Nostoc sp. PCC 7107, complete genome; 427705465; NC_019676.1
3494; Streptomyces decoyicus strain NRRL ISP-5087
P056_Doro1_scaffold78, whole genome shotgun sequence; 662133033;
NZ_KL570321.1
3495; Streptomyces varsoviensis strain NRRL B-3589 contig2.1, whole
genome shotgun sequence; 664348063; NZ_JOFN01000002.1
3496; Scytonema tolypothrichoides VB-61278 scaffold_6, whole genome
shotgun sequence; 890002594; NZ_JXCA01000005.1
3497; Erythrobacter atlanticus strain s21-N3, complete genome; 890444402;
NZ_CP011310.1
3498; Sphingobium yanoikuyae strain SHJ scaffold2, whole genome shotgun
sequence; 893711333; NZ_KQ235984.1
3499; Sphingobium yanoikuyae strain SHJ scaffold12, whole genome shotgun
sequence; 893711343; NZ_KQ235994.1
3500; Sphingobium yanoikuyae strain SHJ scaffold33, whole genome shotgun
sequence; 893711364; NZ_KQ236015.1
3501; Sphingobium yanoikuyae strain SHJ scaffold47, whole genome shotgun
sequence; 893711378; NZ_KQ236029.1
3502; Stenotrophomonas maltophilia strain 544_SMAL
1161_223966_2976806_599_{——}. . ._882_, whole genome shotgun sequence;
896492362; NZ_JVCU01000107.1
3503; Stenotrophomonas maltophilia strain 517_SMAL
472_405557_4951990_20_{——}. . ._115_, whole genome shotgun sequence;
896506125; NZ_JVDZ01000045.1
3504; Stenotrophomonas maltophilia strain 131_SMAL
1126_236170_8501292_717_{——}. . ._1018_, whole genome shotgun sequence;
896520167; NZ_JVUI01000038.1
3505; Stenotrophomonas maltophilia strain 419_SMAL
707_128228_1961615_4_{——}642_{——}523_, whole genome shotgun sequence;
896535166; NZ_JVHW01000017.1
3506; Stenotrophomonas maltophilia strain 179_SMAL
631_468538_7028045_522_{——}. . ._127_, whole genome shotgun sequence;
896555871; NZ_JVRD01000056.1
3507; Stenotrophomonas maltophilia strain 951_SMAL 71_125859_2268311,
whole genome shotgun sequence; 896567682; NZ_JUMH01000022.1
3508; Stenotrophomonas maltophilia strain 22_SMAL
361_494818_13518495_244_{——}194_{——}203_, whole genome shotgun sequence;
896599318; NZ_JVPM01000019.1
3509; Streptococcus pseudopneumoniae strain 445_SPSE
347_91401_2272315_318_{——}. . ._319_, whole genome shotgun sequence;
896667361; NZ_JVGV01000030.1
3510; Streptomyces sp. SBT349 scaffold307_size9018, whole genome
shotgun sequence; 898301838; NZ_LAVK01000307.1
3511; Kitasatospora sp. MY 5-36 Contig_703_, whole genome shotgun
sequence; 902792184; NZ_LFVW01000692.1
3512; Streptomyces caatingaensis strain CMAA 1322 contig02, whole genome
shotgun sequence; 906344334; NZ_LFXA01000002.1
3513; Streptomyces caatingaensis strain CMAA 1322 contig02, whole genome
shotgun sequence; 906344334; NZ_LFXA01000002.1
3514; Streptomyces caatingaensis strain CMAA 1322 contig07, whole genome
shotgun sequence; 906344339; NZ_LFXA01000007.1
3515; Streptomyces caatingaensis strain CMAA 1322 contig09, whole genome
shotgun sequence; 906344341; NZ_LFXA01000009.1
3516; Xanthomonas arboricola 3004 contig00003, whole genome shotgun
sequence; 640500871; NZ_AZQY01000003.1
3517; Candidatus Halobonum tyrrellensis G22 contig00002, whole genome
shotgun sequence; 557371823; NZ_ASGZ01000002.1
3518; Streptomyces wadayamensis strain A23 LGO_A23_AS7_CO0257,
whole genome shotgun sequence; 910050821; NZ_JHDU01000034.1
3519; Bacillus weihenstephanensis strain JAS 83/3 Bw_JAS-
83/3_contig00005, whole genome shotgun sequence; 910095435;
NZ_JNLY01000005.1
3520; Silvibacterium bohemicum strain S15 contig_3, whole genome shotgun
sequence; 910257956; NZ_LBHJ01000003.1
3521; Silvibacterium bohemicum strain S15 contig_3, whole genome shotgun
sequence; 910257956; NZ_LBHJ01000003.1
3522; Silvibacterium bohemicum strain S15 contig_30, whole genome shotgun
sequence; 910257973; NZ_LBHJ01000020.1
3523; Streptococcus pneumoniae strain 37, whole genome shotgun sequence;
912648153; NZ_CKHR01000004.1
3524; Streptococcus pneumoniae strain 37, whole genome shotgun sequence;
912676034; NZ_CMPZ01000004.1
3525; Streptomyces fradiae strain ATCC 19609 contig0008, whole genome
shotgun sequence; 759752221; NZ_JNAD01000008.1
3526; Streptomyces sp. CNS654 CD02DRAFT_scaffold00023.23_C, whole
genome shotgun sequence; 695856316; NZ_JNLT01000024.1
3527; Streptomyces griseus subsp. rhodochrous strain NRRL B-2931 contig3.1,
whole genome shotgun sequence; 664191782; NZ_JOFE01000003.1
3528; Streptomyces sp. NRRL F-2202 contig25.1, whole genome shotgun
sequence; 695860443; NZ_JOIH01000025.1
3529; Streptomyces purpeochromogenes strain NRRL B-3012 contig5.1,
whole genome shotgun sequence; 663242068; NZ_JODK01000005.1
3530; Streptomyces griseus subsp. rhodochrous strain NRRL B-2932 contig37.1,
whole genome shotgun sequence; 664207653; NZ_JOFF01000037.1
3531; Streptomyces sp. NRRL F-5702 contig3.1, whole genome shotgun
sequence; 664537198; NZ_JOHD01000003.1
3532; Streptomyces albus subsp. albus strain NRRL B-2445 contig1.1, whole
genome shotgun sequence; 664084661; NZ_JOED01000001.1
3533; Streptomyces baarnensis strain NRRL B-2842 P144_Doro1_scaffold6,
whole genome shotgun sequence; 662129456; NZ_KL573544.1
3534; Streptomyces sp. NRRL F-3218 contig19.1, whole genome shotgun
sequence; 664170107; NZ_JOIP01000019.1
3535; Streptomyces albus subsp. albus strain NRRL B-2445 contig1.1, whole
genome shotgun sequence; 664084661; NZ_JOED01000001.1
3536; Streptomyces albus subsp. albus strain NRRL B-16041 contig26.1,
whole genome shotgun sequence; 695869320; NZ_JNWW01000026.1
3537; Streptomyces albus subsp. albus strain NRRL B-16041 contig28.1,
whole genome shotgun sequence; 695870063; NZ_JNWW01000028.1
3538; Streptomyces peucetius strain NRRL WC-3868 contig49.1, whole
genome shotgun sequence; 665671804; NZ_JOCK01000052.1
3539; Erythrobacter citreus LAMA 915 Contig13, whole genome shotgun
sequence; 914607448; NZ_JYNE01000028.1
3540; Bacillus flexus strain Riq5 contig_32, whole genome shotgun sequence;
914730676; NZ_LFQJ01000032.1
3541; Xylanimonas cellulosilytica DSM 15894, complete genome;
269954810; NC_013530.1
3542; Streptomyces sp. Mg1, complete genome; 847063800; NZ_CP011664.1
3543; Streptomyces sviceus ATCC 29083 chromosome, whole genome
shotgun sequence; 297196766; NZ_CM000951.1
3544; Burkholderia pseudomallei strain MSHR0169 Contig_2, whole genome
shotgun sequence; 915621003; NZ_LGKL01000002.1
3545; Burkholderia pseudomallei strain E25, whole genome shotgun sequence;
915671105; NZ_CSLP01000001.1
3546; Streptomyces xinghaiensis S187 contig_1763_1, whole genome shotgun
sequence; 485454803; NZ_AFRP01001656.1
3547; Streptomyces sp. W007 contig00241, whole genome shotgun sequence;
365866490; NZ_AGSW01000226.1
3548; Streptomyces violaceusniger Tu 4113, complete genome; 345007964;
NC_015957.1
3549; Streptomyces mobaraensis NBRC 13819 = DSM 40847 contig024,
whole genome shotgun sequence; 458977979; NZ_AORZ01000024.1
3550; Streptomyces mobaraensis NBRC 13819 = DSM 40847 contig079,
whole genome shotgun sequence; 458984960; NZ_AORZ01000079.1
3551; Actinokineospora enzanensis DSM 44649
C503DRAFT_scaffold00014.14, whole genome shotgun sequence;
484005069; NZ_KB894416.1
3552; Streptomyces sp. FXJ7.023 Contig10, whole genome shotgun sequence;
510871397; NZ_APIV01000010.1
3553; Nocardia transvalensis NBRC 15921, whole genome shotgun sequence;
485125031; NZ_BAGL01000055.1
3554; Caulobacter sp. URHA0033 H963DRAFT_scaffold00023.23_C, whole
genome shotgun sequence; 654573246; NZ_AUEO01000025.1
3555; Gloeobacter kilaueensis JS1, complete genome; 554634310;
NC_022600.1
3556; Actinomadura oligospora ATCC 43269 P696DRAFT_scaffold00008.8_C,
whole genome shotgun sequence; 651281457; NZ_JADG01000010.1
3557; Actinomadura oligospora ATCC 43269 P696DRAFT_scaffold00008.8_C,
whole genome shotgun sequence; 651281457; NZ_JADG01000010.1
3558; Streptomyces sp. Tu 6176 scaffold00003, whole genome shotgun
sequence; 740044478; NZ_KK106990.1
3559; Sphingomonas paucimobilis strain EPA505 contig000027, whole
genome shotgun sequence; 739630357; NZ_JFYY01000027.1
3560; Paenibacillus sp. UNC217MF BP95DRAFT_scaffold00011.11_C,
whole genome shotgun sequence; 655084059; NZ_JMLT01000016.1
3561; Hyphomonas chukchiensis strain BH-BN04-4 contig29, whole genome
shotgun sequence; 736736050; NZ_AWFG01000029.1
3562; Fusobacterium necrophorum BFTR-2 contig0075, whole genome
shotgun sequence; 737951550; NZ_JAAG01000075.1
3563; Streptomyces sp. NRRL F-5917 contig68.1, whole genome shotgun
sequence; 663414324; NZ_JOHQ01000068.1
3564; Streptomyces sp. NRRL F-5639 contig31.1, whole genome shotgun
sequence; 664512262; NZ_JOGK01000031.1
3565; Streptomyces sp. NRRL F-5639 contig75.1, whole genome shotgun
sequence; 664515060; NZ_JOGK01000075.1
3566; Streptomyces megasporus strain NRRL B-16372 contig19.1, whole
genome shotgun sequence; 671525382; NZ_JODL01000019.1
3567; Streptomyces albus subsp. albus strain NRRL B-1811 contig32.1, whole
genome shotgun sequence; 665618015; NZ_JODR01000032.1
3568; Streptomyces albus subsp. albus strain NRRL B-1811 contig49.1, whole
genome shotgun sequence; 665618560; NZ_JODR01000049.1
3569; Streptomyces griseus subsp. griseus strain NRRL WC-3480 contig2.1,
whole genome shotgun sequence; 664166765; NZ_JOBR01000002.1
3570; Streptomyces griseorubens strain JSD-1 scaffold1, whole genome
shotgun sequence; 739792456; NZ_KL503830.1
3571; Streptomyces achromogenes subsp. achromogenes strain NRRL B-2120 contig2.1,
whole genome shotgun sequence; 664063830; NZ_JODT01000002.1
3572; Nocardia sp. NRRL WC-3656 contig2.1, whole genome shotgun
sequence; 663737675; NZ_JOJF01000002.1
3573; Streptomyces sp. NRRL S-337 contig31.1, whole genome shotgun
sequence; 664275807; NZ_JOIX01000031.1
3574; Streptomyces sp. NRRL S-337 contig41.1, whole genome shotgun
sequence; 664277815; NZ_JOIX01000041.1
3575; Streptomyces albus subsp. albus strain NRRL B-2362 contig48.1, whole
genome shotgun sequence; 739761647; NZ_JODZ01000048.1
3576; Streptomyces ruber strain NRRL ISP-5378 contig2.1, whole genome
shotgun sequence; 665674644; NZ_JOAQ01000002.1
3577; Streptomyces lavenduligriseus strain NRRL ISP-5487 contig2.1, whole
genome shotgun sequence; 664244706; NZ_JOBD01000002.1
3578; Streptomyces sp. NRRL S-920 contig36.1, whole genome shotgun
sequence; 664256887; NZ_JODF01000036.1
3579; Streptomyces sp. NRRL S-1448 contig134.1, whole genome shotgun
sequence; 663421576; NZ_JOGE01000134.1
3580; Streptomyces bicolor strain NRRL B-3897 contig42.1, whole genome
shotgun sequence; 671498318; NZ_JOFR01000042.1
3581; Streptomyces sp. NRRL WC-3719 contig52.1, whole genome shotgun
sequence; 665530468; NZ_JOCD01000052.1
3582; Streptomyces sp. NRRL WC-3719 contig152.1, whole genome shotgun
sequence; 665536304; NZ_JOCD01000152.1
3583; Streptomyces sp. NRRL WC-3641 P206_Doro1_scaffold18, whole
genome shotgun sequence; 664607641; NZ_KL579016.1
3584; Streptomyces sp. NRRL B-1347 contig19.1, whole genome shotgun
sequence; 664141438; NZ_JOJM01000019.1
3585; Streptomyces toyocaensis strain NRRL 15009 contig00064, whole
genome shotgun sequence; 740092143; NZ_JFCB01000064.1
3586; Streptomyces natalensis strain NRRL B-5314 P055_Doro1_scaffold13,
whole genome shotgun sequence; 662108422; NZ_KL570019.1
3587; Sphingobium yanoikuyae strain B1 contig000002, whole genome
shotgun sequence; 739661773; NZ_JGVR01000002.1
3588; Kibdelosporangium aridum subsp. largum strain NRRL B-24462 contig91.5,
whole genome shotgun sequence; 703243990; NZ_JNYM01001430.1
3589; Streptomyces ruber strain NRRL ISP-5378 contig2.1, whole genome
shotgun sequence; 665674644; NZ_JOAQ01000002.1
3590; Kutzneria albida DSM 43870, complete genome; 754862786;
NZ_CP007155.1
3591; Streptomyces aurantiacus JA 4570 Seq28, whole genome shotgun
sequence; 514916412; NZ_AOPZ01000028.1
3592; Rothia dentocariosa strain C6B contig_5, whole genome shotgun
sequence; 739372122; NZ_JQHE01000003.1
3593; Xanthomonas cannabis pv. phaseoli strain Nyagatare scf_52938_7,
whole genome shotgun sequence; 835885587; NZ_KN265462.1
3594; Novosphingobium malaysiense strain MUSC 273 Contig9, whole
genome shotgun sequence; 746241774; NZ_JTDI01000009.1
3595; Novosphingobium subterraneum strain DSM 12447 NJ75_contig000028,
whole genome shotgun sequence; 746290581; NZ_JRVC01000028.1
3596; Jeotgalibacillus malaysiensis strain D5 chromosome, complete genome;
749182744; NZ_CP009416.1
3597; Microcystis panniformis FACHB-1757, complete genome; 917764592;
NZ_CP011339.1
3598; Streptomyces sp. 769, complete genome; 749181963; NZ_CP003987.1
3599; Actinoplanes sp. SE50/110, complete genome; 386845069;
NC_017803.1
3600; Salinarimonas rosea DSM 21201 G407DRAFT_scaffold00021.21_C,
whole genome shotgun sequence; 655990125; NZ_AUBC01000024.1
3601; Methanobacterium arcticum strain M2 EI99DRAFT_scaffold00005.5_C,
whole genome shotgun sequence; 851140085; NZ_JQKN01000008.1
3602; Allokutzneria albata strain NRRL B-24461 contig22.1, whole genome
shotgun sequence; 663596322; NZ_JOEF01000022.1
3603; Streptomyces olivaceus strain NRRL B-3009 contig20.1, whole genome
shotgun sequence; 664523889; NZ_JOFH01000020.1
3604; Streptomyces sp. NRRL S-118 P205_Doro1_scaffold2, whole genome
shotgun sequence; 664556736; NZ_KL591003.1
3605; Streptomyces sp. NRRL S-118 P205_Doro1_scaffold34, whole genome
shotgun sequence; 664565137; NZ_KL591029.1
3606; Streptomyces luteus strain TRM 45540 Scaffold1, whole genome
shotgun sequence; 759659849; NZ_KN039946.1
3607; Nonomuraea Candida strain NRRL B-24552 contig8.1, whole genome
shotgun sequence; 759934284; NZ_JOAG01000009.1
3608; Nonomuraea Candida strain NRRL B-24552 contig19.1, whole genome
shotgun sequence; 759941310; NZ_JOAG01000020.1
3609; Nonomuraea Candida strain NRRL B-24552 contig27.1, whole genome
shotgun sequence; 759944049; NZ_JOAG01000029.1
3610; Nonomuraea Candida strain NRRL B-24552 contig28.1, whole genome
shotgun sequence; 759944490; NZ_JOAG01000030.1
3611; Nonomuraea Candida strain NRRL B-24552 contig42.1, whole genome
shotgun sequence; 759948103; NZ_JOAG01000045.1
3612; Streptacidiphilus melanogenes strain NBRC 103184, whole genome
shotgun sequence; 755032408; NZ_BBPP01000024.1
3613; Streptacidiphilus anmyonensis strain NBRC 103185, whole genome
shotgun sequence; 755077919; NZ_BBPQ01000048.1
3614; Streptomyces nodosus strain ATCC 14899 genome; 759739811;
NZ_CP009313.1
3615; Kibdelosporangium sp. MJ126-NF4, whole genome shotgun sequence;
754819815; NZ_CDME01000002.1
3616; Streptomyces albus strain DSM 41398, complete genome; 749658562;
NZ_CP010519.1
3617; Novosphingobium sp. P6W scaffold17, whole genome shotgun
sequence; 763097360; NZ_JXZE01000017.1
3618; Magnetospirillum gryphiswaldense MSR-1 v2, complete genome;
568144401; NC_023065.1
3619; Methanobacterium formicicum genome assembly DSM1535,
chromosome: chrI; 851114167; NZ_LN515531.1
3620; Streptomyces sp. NRRL B-1568 contig-76, whole genome shotgun
sequence; 799161588; NZ_JZWZ01000076.1
3621; Streptomyces rubellomurinus subsp. indigofems strain ATCC 31304 contig-55,
whole genome shotgun sequence; 783374270; NZ_JZKG01000056.1
3622; Paenibacillus dauci strain H9 Scaffold3, whole genome shotgun
sequence; 808064534; NZ_KQ040798.1
3623; Allosalinactinospora lopnorensis strain CA15-2 contig00053, whole
genome shotgun sequence; 815864238; NZ_LAJC01000053.1
3624; Jiangella alkaliphila strain KCTC 19222 Scaffold1, whole genome
shotgun sequence; 820820518; NZ_KQ061219.1
3625; Streptomyces natalensis ATCC 27448 Scaffold_46, whole genome
shotgun sequence; 764442321; NZ_JRKI01000041.1
3626; Sphingomonas parapaucimobilis NBRC 15100 BBPI01000030, whole
genome shotgun sequence; 755134941; NZ_BBPI01000030.1
3627; Streptomyces avicenniae strain NRRL B-24776 contig3.1, whole
genome shotgun sequence; 919531973; NZ_JOEK01000003.1
3628; Streptomyces celluloflavus strain NRRL B-2493 contig27.1, whole
genome shotgun sequence; 919546534; NZ_JOEL01000027.1
3629; Streptomyces celluloflavus strain NRRL B-2493 contig60.1, whole
genome shotgun sequence; 919546651; NZ_JOEL01000060.1
3630; Streptomyces celluloflavus strain NRRL B-2493 contig66.1, whole
genome shotgun sequence; 919546672; NZ_JOEL01000066.1
3631; Sphingomonas sp. Y57 scaffold74, whole genome shotgun sequence;
826051019; NZ_LDES01000074.1
3632; Xanthomonas arboricola pv. juglandis strain Xaj 417 genome;
920673152; NZ_CP012251.1
3633; Xanthomonas campestris strain CFSAN033089 contig_46, whole
genome shotgun sequence; 920684790; NZ_LHBW01000046.1
3634; Streptomyces sp. Mg1 supercont1.100, whole genome shotgun
sequence; 254387191; NZ_DS570483.1
3635; Streptomyces sp. HNS054 contig28, whole genome shotgun sequence;
860547590; NZ_LDZX01000028.1
3636; Streptomyces ahygroscopicus subsp. wuyiensis strain CK-15 contig3,
whole genome shotgun sequence; 921220646; NZ_JXYI02000059.1
3637; Paenibacillus peoriae strain HS311, complete genome; 922052336;
NZ_CP011512.1
3638; Paenibacillus sp. FJAT-27812 scaffold_0, whole genome shotgun
sequence; 922780240; NZ_LIGH01000001.1
3639; Stenotrophomonas maltophilia strain ISMMS2R, complete genome;
923060045; NZ_CP011306.1
3640; Stenotrophomonas maltophilia strain ISMMS3, complete genome;
923067758; NZ_CP011010.1
3641; Hapalosiphon sp. MRB220 contig_91, whole genome shotgun
sequence; 923076229; NZ_LIRN01000111.1
3642; Bacillus sp. FJAT-18019 super1, whole genome shotgun sequence;
924371245; NZ_LITP01000001.1
3643; Stenotrophomonas maltophilia strain B4 contig779, whole genome
shotgun sequence; 924516300; NZ_LDVR01000003.1
3644; Bacillus sp. FJAT-21352 Scaffold1, whole genome shotgun sequence;
924654439; NZ_LIUS01000003.1
3645; Sphingopyxis sp. 113P3, complete genome; 924898949;
NZ_CP009452.1
3646; Sphingopyxis sp. 113P3, complete genome; 924898949;
NZ_CP009452.1
3647; Streptomyces sp. CFMR 7 strain CFMR-7, complete genome;
924911621; NZ_CP011522.1
3648; Bacillus gobiensis strain FJAT-4402 chromosome; 926268043;
NZ_CP012600.1
3649; Streptomyces sp. MMG1522 P406contig11.1, whole genome shotgun
sequence; 926270045; NZ_LGDF01000013.1
3650; Nocardiopsis sp. NRRL B-16309 P441contig5.1, whole genome
shotgun sequence; 926283036; NZ_LGEC01000103.1
3651; Streptomyces sp. NRRL F-2295 P395contig79.1, whole genome
shotgun sequence; 926288193; NZ_LGCY01000146.1
3652; Streptomyces sp. XY431 P412contig111.1, whole genome shotgun
sequence; 926317398; NZ_LGDO01000015.1
3653; Streptomyces sp. NRRL F-6492 P446contig3.1, whole genome shotgun
sequence; 926315769; NZ_LGEG01000211.1
3654; Streptomyces sp. NRRL B-1140 P439contig15.1, whole genome
shotgun sequence; 926344107; NZ_LGEA01000058.1
3655; Streptomyces sp. NRRL B-1140 P439contig32.1, whole genome
shotgun sequence; 926344331; NZ_LGEA01000105.1
3656; Streptomyces sp. NRRL F-5755 P309contig48.1, whole genome
shotgun sequence; 926371517; NZ_LGCW01000271.1
3657; Streptomyces sp. NRRL F-5755 P309contig50.1, whole genome
shotgun sequence; 926371520; NZ_LGCW01000274.1
3658; Streptomyces sp. NRRL F-5755 P309contig7.1, whole genome shotgun
sequence; 926371541; NZ_LGCW01000295.1
3659; Saccharothrix sp. NRRL B-16348 P442contig71.1, whole genome
shotgun sequence; 926395199; NZ_LGED01000246.1
3660; Streptomyces sp. WM6378 P402contig63.1, whole genome shotgun
sequence; 926403453; NZ_LGDD01000321.1
3661; Streptomyces sp. WM6378 P402contig63.1, whole genome shotgun
sequence; 926403453; NZ_LGDD01000321.1
3662; Nocardia sp. NRRL S-836 P437contig3.1b, whole genome shotgun
sequence; 926412094; NZ_LGDY01000103.1
3663; Nocardia sp. NRRL S-836 P437contig39.1, whole genome shotgun
sequence; 926412104; NZ_LGDY01000113.1
3664; Paenibacillus sp. A59 contig_353, whole genome shotgun sequence;
927084730; NZ_LITU01000050.1
3665; Paenibacillus sp. A59 contig_416, whole genome shotgun sequence;
927084736; NZ_LITU01000056.1
3666; Streptomyces sp. XY332 P409contig34.1, whole genome shotgun
sequence; 927093145; NZ_LGHN01000166.1
3667; Streptomyces rimosus subsp. rimosus strain NRRL WC-3898 P259contig86.1,
whole genome shotgun sequence; 927279089; NZ_LGCU01000353.1
3668; Streptomyces rimosus subsp. pseudoverticillatus strain NRRL WC-3896
P270contig51.1, whole genome shotgun sequence; 927292651; NZ_LGCV01000382.1
3669; Streptomyces rimosus subsp. pseudoverticillatus strain NRRL WC-3896
P270contig8.1, whole genome shotgun sequence; 927292684; NZ_LGCV01000415.1
3670; Aneurinibacillus migulanus strain Nagano E1 contig_36, whole genome
shotgun sequence; 928874573; NZ_LIXL01000208.1
3671; Streptomyces chattanoogensis strain NRRL ISP-5002 ISP5002contig8.1,
whole genome shotgun sequence; 928897585; NZ_LGKG01000196.1
3672; Streptomyces chattanoogensis strain NRRL ISP-5002 ISP5002contig9.1,
whole genome shotgun sequence; 928897596; NZ_LGKG01000207.1
3673; Streptomyces sp. NRRL F-6602 F6602contig54.1, whole genome
shotgun sequence; 928910033; NZ_LGKH01004848.1
3674; Ideonella sakaiensis strain 201-F6, whole genome shotgun sequence;
928998724; NZ_BBYR01000007.1
3675; Ideonella sakaiensis strain 201-F6, whole genome shotgun sequence;
928998800; NZ_BBYR01000083.1
3676; Bacillus sp. FJAT-28004 scaffold_2, whole genome shotgun sequence;
929005248; NZ_LGHP01000003.1
3677; Novosphingobium sp. AAP1 AAP1Contigs7, whole genome shotgun
sequence; 930029075; NZ_LJHO01000007.1
3678; Novosphingobium sp. AAP1 AAP1Contigs9, whole genome shotgun
sequence; 930029077; NZ_LJHO01000009.1
3679; Stenotrophomonas maltophilia strain OC194 contig_98, whole genome
shotgun sequence; 930169273; NZ_LJJH01000098.1
3680; Actinobacteria bacterium OK074 ctg60, whole genome shotgun
sequence; 930473294; NZ_LJCV01000275.1
3681; Actinobacteria bacterium OK006 ctg112, whole genome shotgun
sequence; 930490730; NZ_LJCU01000014.1
3682; Actinobacteria bacterium OK006 ctg96, whole genome shotgun
sequence; 930491003; NZ_LJCU01000287.1
3683; Kibdelosporangium phytohabitans strain KLBMP1111, complete
genome; 931609467; NZ_CP012752.1
3684; Streptococcus pneumoniae strain PT8082 isolate E3GXY, whole
genome shotgun sequence; 935445269; NZ_CIEC02000098.1
3685; Paenibacillus solani strain FJAT-22460 super3, whole genome shotgun
sequence; 935460965; NZ_LIUT01000006.1
3686; Novosphingobium sp. ST904 contig_104, whole genome shotgun
sequence; 935540718; NZ_LGJH01000063.1
3687; Citromicrobium sp. RCC1878 contig2, whole genome shotgun
sequence; 936191447; NZ_LBLZ01000002.1
3688; Frankia sp. R43 contig001, whole genome shotgun sequence;
937182893; NZ_LFCW01000001.1
3689; Sphingopyxis macrogoltabida strain EY-1, complete genome;
937372567; NZ_CP012700.1
3690; Sphingopyxis macrogoltabida strain EY-1, complete genome;
937372567; NZ_CP012700.1
3691; Xanthomonas arboricola strain CITA 44 CITA_44_contig_26, whole
genome shotgun sequence; 937505789; NZ_LJGM01000026.1
3692; Stenotrophomonas acidaminiphila strain ZAC14D2_NAIMI4_2,
complete genome; 938883590; NZ_CP012900.1
3693; Sphingopyxis macrogoltabida strain 203, complete genome; 938956730;
NZ_CP009429.1
3694; Sphingopyxis macrogoltabida strain 203, complete genome; 938956730;
NZ_CP009429.1
3695; Sphingopyxis macrogoltabida strain 203 plasmid, complete sequence;
938956814; NZ_CP009430.1
3696; Cellulosilyticum ruminicola JCM 14822, whole genome shotgun
sequence; 938965628; NZ_BBCG01000065.1
3697; Brevundimonas sp. DS20, complete genome; 938989745; NZ_CP012897.1
3698; Brevundimonas sp. DS20, complete genome; 938989745; NZ_CP012897.1
3699; Paenibacillus sp. GD6, whole genome shotgun sequence; 939708098;
NZ_LN831198.1
3700; Paenibacillus sp. GD6, whole genome shotgun sequence; 939708105;
NZ_LN831205.1
3701; Alicyclobacillus ferrooxydans strain TC-34 contig_22, whole genome
shotgun sequence; 940346731; NZ_LJCO01000107.1
3702; Xanthomonas sp. Mitacek01 contig_17, whole genome shotgun
sequence; 941965142; NZ_LKIT01000002.1
3703; Streptomyces bingchenggensis BCW-1, complete genome; 374982757;
NC_016582.1
3704; Streptomyces pactum strain ACT12 scaffold1, whole genome shotgun
sequence; 943388237; NZ_LIQD01000001.1
3705; Streptomyces flocculus strain NRRL B-2465 B2465_contig_205, whole
genome shotgun sequence; 943674269; NZ_LIQO01000205.1
3706; Streptomyces aurantiacus strain NRRL ISP-5412 ISP-5412_contig_138,
whole genome shotgun sequence; 943881150; NZ_LIPP01000138.1
3707; Streptomyces graminilatus strain NRRL B-59124 B59124_contig_7,
whole genome shotgun sequence; 943897669; NZ_LIQQ01000007.1
3708; Streptomyces alboniger strain NRRL B-1832 B-1832_contig_37, whole
genome shotgun sequence; 943898694; NZ_LIQN01000037.1
3709; Streptomyces alboniger strain NRRL B-1832 B-1832_contig_384,
whole genome shotgun sequence; 943899498; NZ_LIQN01000384.1
3710; Streptomyces kanamyceticus strain NRRL B-2535 B-2535_contig_122,
whole genome shotgun sequence; 943922224; NZ_LIQU01000122.1
3711; Streptomyces kanamyceticus strain NRRL B-2535 B-2535_contig_247,
whole genome shotgun sequence; 943922567; NZ_LIQU01000247.1
3712; Streptomyces luridiscabiei strain NRRL B-24455 B24455_contig_315,
whole genome shotgun sequence; 943927948; NZ_LIQV01000315.1
3713; Streptomyces atriruber strain NRRL B-24165 contig_124, whole
genome shotgun sequence; 943949281; NZ_LIPN01000124.1
3714; Streptomyces hirsutus strain NRRL B-2713 B2713_contig_57, whole
genome shotgun sequence; 944005810; NZ_LIQT01000057.1
3715; Streptomyces aureus strain NRRL B-2808 contig_171, whole genome
shotgun sequence; 944012845; NZ_LIPQ01000171.1
3716; Streptomyces prasinus strain NRRL B-12521 B12521_contig_230,
whole genome shotgun sequence; 944020089; NZ_LIPR01000230.1
3717; Streptomyces phaeochromogenes strain NRRL B-1248 B-1248_contig_126,
whole genome shotgun sequence; 944029528; NZ_LIQZ01000126.1
3718; Streptomyces prasinus strain NRRL B-2712 B2712_contig_323, whole
genome shotgun sequence; 944410649; NZ_LIRH01000323.1
3719; Streptomyces prasinopilosus strain NRRL B-2711 B2711_contig_370,
whole genome shotgun sequence; 944415035; NZ_LIRG01000370.1
3720; Streptomyces torulosus strain NRRL B-3889 B-3889_contig_18, whole
genome shotgun sequence; 944495433; NZ_LIRK01000018.1
3721; Frankia alni str. ACN14A chromosome, complete sequence;
111219505; NC_008278.1
3722; Frankia sp. CpI1-S FF36_scaffold_9.10, whole genome shotgun
sequence; 768715243; NZ_JYFN01000010.1
3723; Sphingomonas sp. Leaf20 contig_1, whole genome shotgun sequence;
947349881; NZ_LMKN01000001.1
3724; Paenibacillus sp. Leaf72 contig_6, whole genome shotgun sequence;
947378267; NZ_LMLV01000032.1
3725; Sphingomonas sp. Leaf230 contig_4, whole genome shotgun sequence;
947401208; NZ_LMKW01000010.1
3726; Sanguibacter sp. Leaf3 contig_2, whole genome shotgun sequence;
947472882; NZ_LMRH01000002.1
3727; Aeromicrobium sp. Root344 contig_1, whole genome shotgun
sequence; 947552260; NZ_LMDH01000001.1
3728; Sphingopyxis sp. Root1497 contig_3, whole genome shotgun sequence;
947689975; NZ_LMGF01000003.1
3729; Sphingomonas sp. Root1294 contig_7, whole genome shotgun
sequence; 947890193; NZ_LMEJ01000014.1
3730; Sphingomonas sp. Root720 contig_7, whole genome shotgun sequence;
947704642; NZ_LMID01000015.1
3731; Sphingomonas sp. Root720 contig_8, whole genome shotgun sequence;
947704650; NZ_LMID01000016.1
3732; Sphingomonas sp. Root710 contig_1, whole genome shotgun sequence;
947721816; NZ_LMIB01000001.1
3733; Sphingomonas sp. Root1294 contig_7, whole genome shotgun
sequence; 947890193; NZ_LMEJ01000014.1
3734; Mesorhizobium sp. Root172 contig_2, whole genome shotgun sequence;
947919015; NZ_LMHP01000012.1
3735; Mesorhizobium sp. Root102 contig_3, whole genome shotgun sequence;
947937119; NZ_LMCP01000023.1
3736; Paenibacillus sp. Soil750 contig_1, whole genome shotgun sequence;
947966412; NZ_LMSD01000001.1
3737; Paenibacillus sp. Soil522 contig_3, whole genome shotgun sequence;
947983982; NZ_LMRV01000044.1
3738; Paenibacillus sp. Soil522 contig_3, whole genome shotgun sequence;
947983982; NZ_LMRV01000044.1
3739; Paenibacillus sp. Root52 contig_3, whole genome shotgun sequence;
948045460; NZ_LMFO01000023.1
3740; Enterococcus faecalis ATCC 29212 contig24, whole genome shotgun
sequence; 401673929; ALOD01000024.1
3741; Mesorhizobium sp. Root695 contig_1, whole genome shotgun sequence;
950019035; NZ_LMHO01000001.1
3742; Bacillus sp. Soil768D1 contig_5, whole genome shotgun sequence;
950170460; NZ_LMTA01000046.1
3743; Paenibacillus sp. Root444D2 contig_4, whole genome shotgun
sequence; 950271971; NZ_LMEO01000034.1
3744; Paenibacillus sp. Soil766 contig_32, whole genome shotgun sequence;
950280827; NZ_LMSJ01000026.1
3745; Streptococcus pneumoniae strain type strain: N, whole genome shotgun
sequence; 950938054; NZ_CIHL01000007.1
3746; Streptomyces sp. Root1310 contig_5, whole genome shotgun sequence;
951121600; NZ_LMEQ01000031.1
3747; Bacillus muralis strain DSM 16288 Scaffold4, whole genome shotgun
sequence; 951610263; NZ_LMBV01000004.1
3748; Streptomyces sp. MBT76 scaffold_2, whole genome shotgun sequence;
953813788; NZ_LNBE01000002.1
3749; Streptomyces sp. MBT76 scaffold_3, whole genome shotgun sequence;
953813789; NZ_LNBE01000003.1
3750; Streptomyces sp. MBT76 scaffold_4, whole genome shotgun sequence;
953813790; NZ_LNBE01000004.1
3751; Clostridium butyricum strain KNU-L09 chromosome 1, complete
sequence; 959868240; NZ_CP013252.1
3752; Clostridium butyricum strain NEC8, whole genome shotgun sequence;
960334134; NZ_CBYK010000003.1
3753; Gorillibacterium sp. SN4, whole genome shotgun sequence; 960412751;
NZ_LN881722.1
3754; Thalassobius activus strain CECT 5114, whole genome shotgun
sequence; 960424655; NZ_CYUE01000025.1
3755; Microbacterium testaceum strain NS283 contig_37, whole genome
shotgun sequence; 969836538; NZ_LDRU01000037.1
3756; Microbacterium testaceum strain NS206 contig_27, whole genome
shotgun sequence; 969912012; NZ_LDRS01000027.1
3757; Microbacterium testaceum strain NS183 contig_65, whole genome
shotgun sequence; 969919061; NZ_LDRR01000065.1
3758; Paenibacillus jamilae strain NS115 contig_27, whole genome shotgun
sequence; 970428876; NZ_LDRX01000027.1
3759; Sphingopyxis sp. H050 H050_contig000006, whole genome shotgun
sequence; 970555001; NZ_LNRZ01000006.1
3760; Paenibacillus polymyxa strain KF-1 scaffold00001, whole genome
shotgun sequence; 970574347; NZ_LNZF01000001.1
3761; Luteimonas abyssi strain XH031 Scaffold1, whole genome shotgun
sequence; 970579907; NZ_KQ759763.1

TABLE 5
Exemplary Lasso RRE
Lasso RRE Peptide No: #; Species of Origin; GI#; Accession#

3762; Geobacter uraniireducens Rf4, complete genome; 148262085;
NC_009483.1
3763; Sphingomonas wittichii RW1, complete genome; 148552929;
NC_009511.1
3764; Sanguibacter keddieii DSM 10542, complete genome; 269793358;
NC_013521.1
3765; Xylanimonas cellulosilytica DSM 15894, complete genome;
269954810; NC_013530.1
3766; Spirosoma linguale DSM 74, complete genome; 283814236;
CP001769.1
3767; Streptomyces bingchenggensis BCW-1, complete genome; 374982757;
NC_016582.1
3768; Streptomyces bingchenggensis BCW-1, complete genome; 374982757;
NC_016582.1
3769; Gallionella capsiferriformans ES-2, complete genome; 302877245;
NC_014394.1
3770; Mycobacterium sinense strain JDM601, complete genome; 333988640;
NC_015576.1
3771; Streptomyces violaceusniger Tu 4113, complete genome; 345007964;
NC_015957.1
3772; Rhodospirillum rubrum F11, complete genome; 386348020;
NC_017584.1
3773; Actinoplanes sp. SE50/110, complete genome; 386845069;
NC_017803.1
3774; Emticicia oligotrophica DSM 17448, complete genome; 408671769;
NC_018748.1
3775; Tistrella mobilis KA081020-065 plasmid pTM1, complete sequence;
442559580; NC_017957.2
3776; Bacillus thuringiensis MC28, complete genome; 407703236;
NC_018693.1
3777; Nostoc sp. PCC 7107, complete genome; 427705465; NC_019676.1
3778; Synechococcus sp. PCC 6312, complete genome; 427711179;
NC_019680.1
3779; Stanieria cyanosphaera PCC 7437, complete genome; 428267688;
CP003653.1
3780; Desulfocapsa sulfexigens DSM 10523, complete genome; 451945650;
NC_020304.1
3781; Xanthomonas citri pv. punicae str. LMG 859, whole genome shotgun
sequence; 390991205; NZ_CAGJ01000031.1
3782; Streptomyces fulvissimus DSM 40593, complete genome; 488607535;
NC_021177.1
3783; Streptomyces rapamycinicus NRRL 5491 genome; 521353217;
CP006567.1
3784; Gloeobacter kilaueensis JS1, complete genome; 554634310;
NC_022600.1
3785; Gloeobacter kilaueensis JS1, complete genome; 554634310;
NC_022600.1
3786; Kutzneria albida strain NRRL B-24060 contig305.1, whole genome
shotgun sequence; 662161093; NZ_JNYH01000515.1
3787; Kutzneria albida strain NRRL B-24060 contig305.1, whole genome
shotgun sequence; 662161093; NZ_JNYH01000515.1
3788; Mesorhizobium huakuii 7653R genome; 657121522; CP006581.1
3789; Sphingopyxis fribergensis strain Kp5.2, complete genome; 749188513;
NZ_CP009122.1
3790; Amycolatopsis lurida NRRL 2430, complete genome; 755908329;
CP007219.1
3791; Streptomyces lydicus A02, complete genome; 822214995;
NZ_CP007699.1
3792; Streptomyces lydicus A02, complete genome; 822214995;
NZ_CP007699.1
3793; Uncultured bacterium clone AZ25P121 genomic sequence; 818476494;
KP274854.1
3794; Streptomyces sp. PBH53 genome; 852460626; CP011799.1
3795; Streptomyces sp. PBH53 genome; 852460626; CP011799.1
3796; Streptomyces sp. PBH53 genome; 852460626; CP011799.1
3797; Bifidobacterium longum subsp. infantis strain BT1, complete genome;
927296881; CP010411.1
3798; Nostoc piscinale CENA21 genome; 930349143; CP012036.1
3799; Paenibacillus sp. 32O-W, complete genome; 961447255; CP013653.1
3800; Streptomyces avermitilis MA-4680 = NBRC 14893, complete genome;
162960844; NC_003155.4
3801; Streptomyces avermitilis MA-4680 = NBRC 14893, complete genome;
162960844; NC_003155.4
3802; Kitasatospora setae KM-6054 DNA, complete genome; 357386972;
NC_016109.1
3803; Rhodococcus jostii lariatin biosynthetic gene cluster (larA, larB, larC,
larD, larE), complete cds; 380356103; AB593691.1
3804; Pseudomonas sp. St29 DNA, complete genome; 771846103;
AP014628.1
3805; Pseudomonas sp. St29 DNA, complete genome; 771846103;
AP014628.1
3806; Fischerella sp. NIES-3754 DNA, complete genome; 965684975;
AP017305.1
3807; Magnetospirillum gryphiswaldense MSR-1, WORKING DRAFT
SEQUENCE, 373 unordered pieces; 144897097; CU459003.1
3808; Streptococcus suis 98HAH33, complete genome; 145690656;
CP000408.1
3809; Salinibacter ruber M8 chromosome, complete genome; 294505815;
NC_014032.1
3810; Enterococcus faecalis strain P9-1 scaffold484.1, whole genome shotgun
sequence; 949763393; NZ_LKGS01000484.1
3811; Saccharothrix espanaensis DSM 44229 complete genome; 433601838;
NC_019673.1
3812; Roseburia sp. CAG: 197 WGS project CBBL01000000 data, contig,
whole genome shotgun sequence; 524261006; CBBL010000225.1
3813; Clostridium sp. CAG: 221 WGS project CBDC01000000 data, contig,
whole genome shotgun sequence; 524362382; CBDC010000065.1
3814; Clostridium sp. CAG: 411 WGS project CBIY01000000 data, contig,
whole genome shotgun sequence; 524742306; CBIY010000075.1
3815; Roseburia sp. CAG: 100 WGS project CBKV01000000 data, contig,
whole genome shotgun sequence; 524842500; CBKV010000277.1
3816; Mesorhizobium plurifarium, whole genome shotgun sequence;
751292755; NZ_CCNE01000004.1
3817; Kibdelosporangium sp. MJ126-NF4, whole genome shotgun sequence;
754819815; NZ_CDME01000002.1
3818; Kibdelosporangium sp. MJ126-NF4 genome assembly High
quaKibdelosporangium sp. MJ126-NF4, scaffold BPA_8, whole genome
shotgun sequence; 747653426; CDME0100001
3819; Methanobacterium formicicum genome assembly isolate Mb9,
chromosome: I; 952971377; LN734822.1
3820; Streptococcus pneumoniae strain type strain: N, whole genome shotgun
sequence; 950938054; NZ_CIHL01000007.1
3821; Streptococcus pneumoniae strain type strain: N, whole genome shotgun
sequence; 950938054; NZ_CIHL01000007.1
3822; Streptococcus pneumoniae strain type strain: N, whole genome shotgun
sequence; 950938054; NZ_CIHL01000007.1
3823; Bacillus cereus genome assembly Bacillus JRS4, contig contig000025,
whole genome shotgun sequence; 924092470; CYHM01000025.1
3824; Pedobacter sp. BAL39 1103467000492, whole genome shotgun
sequence; 149277373; NZ_ABCM01000005.1
3825; Streptomyces sviceus ATCC 29083 chromosome, whole genome
shotgun sequence; 297196766; NZ_CM000951.1
3826; Streptomyces pristinaespiralis ATCC 25486 chromosome, whole
genome shotgun sequence; 297189896; NZ_CM000950.1
3827; Enterococcus faecalis strain P9-1 scaffold484.1, whole genome shotgun
sequence; 949763393; NZ_LKGS01000484.1
3828; Enterococcus faecalis strain P9-1 scaffold484.1, whole genome shotgun
sequence; 949763393; NZ_LKGS01000484.1
3829; Streptomyces sp. CNS654 CD02DRAFT_scaffold00023.23_C, whole
genome shotgun sequence; 695856316; NZ_JNLT01000024.1
3830; Streptococcus vestibularis F0396 ctg1126932565723, whole genome
shotgun sequence; 311100538; AEKO01000007.1
3831; Ruminococcus albus 8 contig00035, whole genome shotgun sequence;
325680876; NZ_ADKM02000123.1
3832; Streptomyces sp. W007 contig00293, whole genome shotgun sequence;
365867746; NZ_AGSW01000272.1
3833; Streptomyces auratus AGR0001 Scaffold1_85, whole genome shotgun
sequence; 396995461; AJGV01000085.1
3834; Actinomyces naeslundii str. Howell 279 ctg1130888818142, whole
genome shotgun sequence; 399903251; ALJK01000024.1
3835; Enterococcus faecalis strain P9-1 scaffold484.1, whole genome shotgun
sequence; 949763393; NZ_LKGS01000484.1
3836; Amycolatopsis decaplanina DSM 44594 Contig0055, whole genome
shotgun sequence; 458848256; NZ_AOHO01000055.1
3837; Streptomyces mobaraensis NBRC 13819 = DSM 40847 contig024,
whole genome shotgun sequence; 458977979; NZ_AORZ01000024.1
3838; Enterococcus faecalis strain P9-1 scaffold484.1, whole genome shotgun
sequence; 949763393; NZ_LKGS01000484.1
3839; Enterococcus faecalis strain P9-1 scaffold484.1, whole genome shotgun
sequence; 949763393; NZ_LKGS01000484.1
3840; Streptomyces aurantiacus JA 4570 Seq28, whole genome shotgun
sequence; 514916412; NZ_AOPZ01000028.1
3841; Streptomyces aurantiacus JA 4570 Seq17, whole genome shotgun
sequence; 514916021; NZ_AOPZ01000017.1
3842; Enterococcus faecalis strain P9-1 scaffold484.1, whole genome shotgun
sequence; 949763393; NZ_LKGS01000484.1
3843; Paenibacillus alvei A6-6i-x PAAL66ix_14, whole genome shotgun
sequence; 528200987; ATMS01000061.1
3844; Dehalobacter sp. UNSWDHB Contig_139, whole genome shotgun
sequence; 544905305; NZ_AUUR01000139.1
3845; Actinobaculum sp. oral taxon 183 str. F0552 A_P1HMPREF0043-
1.0_Cont15.2, whole genome shotgun sequence; 541473965;
AWSB01000041.1
3846; Actinobaculum sp. oral taxon 183 str. F0552 A_P1HMPREF0043-
1.0_Cont1.1, whole genome shotgun sequence; 541476958;
AWSB01000006.1
3847; Propionibacterium acidifaciens F0233 ctg1127964738299, whole
genome shotgun sequence; 544249812; ACVN02000045.1
3848; Rubidibacter lacunae KORDI 51-2 KR51_contig00121, whole genome
shotgun sequence; 550281965; NZ_ASSJ01000070.1
3849; Rothia aeria F0184 R_aeriaHMPREF0742-1.0_Cont136.4, whole
genome shotgun sequence; 551695014; AXZG01000035.1
3850; Candidatus Halobonum tyrrellensis G22 contig00002, whole genome
shotgun sequence; 557371823; NZ_ASGZ01000002.1
3851; Streptomyces niveus NCIMB 11891 contig00003, whole genome
shotgun sequence; 558542923; AWQW01000003.1
3852; Frankia sp. Thr ThrDRAFT_scaffold_28.29, whole genome shotgun
sequence; 602262270; JENI01000029.1
3853; Clostridium butyricum DORA_1 Q607_CBUC00058, whole genome
shotgun sequence; 566226100; AZLX01000058.1
3854; Streptococcus sp. DORA_10 Q617_SPSC00257, whole genome
shotgun sequence; 566231608; AZMH01000257.1
3855; Candidatus Entotheonella factor TSY1_contig00913, whole genome
shotgun sequence; 575408569; AZHW01000959.1
3856; Streptomyces sp. CNS654 CD02DRAFT_scaffold00023.23_C, whole
genome shotgun sequence; 695856316; NZ_JNLT01000024.1
3857; Frankia sp. Thr ThrDRAFT_scaffold_28.29, whole genome shotgun
sequence; 602262270; JENI01000029.1
3858; Bacillus akibai JCM 9157, whole genome shotgun sequence;
737696658; NZ_BAUV01000025.1
3859; Bacillus boroniphilus JCM 21738 DNA, contig: contig_6, whole
genome shotgun sequence; 571146044; BAUW01000006.1
3860; Gracilibacillus boraciitolerans JCM 21714 DNA, contig: contig_30,
whole genome shotgun sequence; 575082509; BAVS01000030.1
3861; Streptomyces griseorubens strain JSD-1 contig143, whole genome
shotgun sequence; 657284919; JJMG01000143.1
3862; Frankia sp. CeD CEDDRAFT_scaffold_22.23, whole genome shotgun
sequence; 737947180; NZ_JPGU01000023.1
3863; Frankia sp. Thr ThrDRAFT_scaffold_28.29, whole genome shotgun
sequence; 602262270; JENI01000029.1
3864; Streptomyces sp. JS01 contig2, whole genome shotgun sequence;
695871554; NZ_JPWW01000002.1
3865; Rothia dentocariosa strain C6B contig_5, whole genome shotgun
sequence; 739372122; NZ_JQHE01000003.1
3866; Candidatus Thiomargarita nelsonii isolate Hydrate Ridge contig_1164,
whole genome shotgun sequence; 723288710; JSZA01001164.1
3867; Streptomyces globisporus C-1027 Scaffold24_1, whole genome shotgun
sequence; 41065119; NZ_AJUO01000171.1
3868; Lechevalieria aerocolonigenes strain NRRL B-16140 contig11.3, whole
genome shotgun sequence; 772744565; NZ_JYJG01000059.1
3869; Desulfobulbaceae bacterium BRH_c16a BRHa_1001515, whole
genome shotgun sequence; 780791108; LADS01000058.1
3870; Peptococcaceae bacterium BRH_c4b BRHa_1001357, whole genome
shotgun sequence; 780813318; LADO01000010.1
3871; Streptomyces rubellomurinus subsp. indigofems strain ATCC 31304
contig-55, whole genome shotgun sequence; 783374270;
NZ_JZKG01000056.1
3872; Streptomyces sp. NRRL S-444 contig322.4, whole genome shotgun
sequence; 797049078; JZWX01001028.1
3873; Streptomyces sp. NRRL B-1568 contig-76, whole genome shotgun
sequence; 799161588; NZ_JZWZ01000076.1
3874; Streptomyces caatingaensis strain CMAA 1322 contig02, whole genome
shotgun sequence; 906344334; NZ_LFXA01000002.1
3875; Paenibacillus polymyxa strain YUPP-8 scaffold32, whole genome
shotgun sequence; 924434005; LIYK01000027.1
3876; Streptomyces rimosus subsp. rimosus strain NRRL B-16073 contig48.1,
whole genome shotgun sequence; 696497741; NZ_JNWX01000048.1
3877; Streptomyces rimosus subsp. rimosus ATCC 10970 contig00333, whole
genome shotgun sequence; 441178796; NZ_ANSJ01000259.1
3878; Streptomyces rimosus subsp. rimosus strain NRRL B-16073 contig48.1,
whole genome shotgun sequence; 696497741; NZ_JNWX01000048.1
3879; Streptomyces rimosus subsp. rimosus strain NRRL WC-3869
P248contig20.1, whole genome shotgun sequence; 925322461;
LGCQ01000113.1
3880; Streptomyces rimosus subsp. rimosus ATCC 10970 contig00333, whole
genome shotgun sequence; 441178796; NZ_ANSJ01000259.1
3881; Streptomyces rimosus subsp. rimosus ATCC 10970 contig00333, whole
genome shotgun sequence; 441178796; NZ_ANSJ01000259.1
3882; Streptomyces rimosus subsp. rimosus strain NRRL B-16073 contig48.1,
whole genome shotgun sequence; 696497741; NZ_JNWX01000048.1
3883; Streptomyces rimosus subsp. rimosus strain NRRL B-2660 contigl24.1,
whole genome shotgun sequence; 664066234; NZ_JOES01000124.1
3884; Streptomyces sp. NRRL F-5755 P309contig50.1, whole genome
shotgun sequence; 926371520; NZ_LGCW01000274.1
3885; Streptomyces sp. NRRL F-5755 P309contig48.1, whole genome
shotgun sequence; 926371517; NZ_LGCW01000271.1
3886; Streptomyces sp. NRRL S-444 contig322.4, whole genome shotgun
sequence; 797049078; JZWX01001028.1
3887; Actinobacteria bacterium OK006 ctg96, whole genome shotgun
sequence; 930491003; NZ_LJCU01000287.1
3888; Actinobacteria bacterium OK074 ctg60, whole genome shotgun
sequence; 930473294; NZ_LJCV01000275.1
3889; Betaproteobacteria bacterium SG8_39 WOR_8-12_2589, whole
genome shotgun sequence; 931421682; LJTQ01000030.1
3890; Candidate division BRC1 bacterium SM23_51 WORSMTZ_10094,
whole genome shotgun sequence; 931536013; LJUL01000022.1
3891; Bacillus vietnamensis strain UCD-SED5 scaffold_15, whole genome
shotgun sequence; 933903534; LIXZ01000017.1
3892; Erythrobacteraceae bacterium HL-111 ITZY_scaf_51, whole genome
shotgun sequence; 938259025; LJSW01000006.1
3893; Halomonas sp. HL-93 ITZY_scaf_415, whole genome shotgun
sequence; 938285459; LJST01000237.1
3894; Paenibacillus sp. Soil724D2 contig_11, whole genome shotgun
sequence; 946400391; LMRY01000003.1
3895; Paenibacillus sp. Root444D2 contig_4, whole genome shotgun
sequence; 950271971; NZ_LMEO01000034.1
3896; Streptomyces silvensis strain ATCC 53525
53525_Assembly_Contig_22, whole genome shotgun sequence; 970361514;
LOCL01000028.1
3897; Bacillus mycoides strain Flugge 10206 DJ94.contig-100_16, whole
genome shotgun sequence; 727343482; NZ_JMQD01000030.1
3898; Bacillus cereus BAG3X2-1 supercont1.1, whole genome shotgun
sequence; 423416528; NZ_JH791923.1
3899; Bacillus thuringiensis MC28, complete genome; 407703236;
NC_018693.1
3900; Bacillus cereus VD131 acrHi-supercont2.9, whole genome shotgun
sequence; 507037581; NZ_KB976660.1
3901; Bacillus cereus Rock4-18 chromosome, whole genome shotgun
sequence; 238801487; NZ_CM000735.1
3902; Bacillus cereus AH1271 chromosome, whole genome shotgun
sequence; 238801491; NZ_CM000739.1
3903; Bacillus cereus Rock3-44 chromosome, whole genome shotgun
sequence; 238801485; NZ_CM000733.1
3904; Bacillus cereus VD115 supercont1.1, whole genome shotgun sequence;
423614674; NZ_JH792165.1
3905; Bacillus sp. UMTAT18 contig000011, whole genome shotgun
sequence; 806951735;NZ_JSFD01000011.1
3906; Bacillus cereus BAG5X2-1 supercont1.1, whole genome shotgun
sequence; 423456860; NZ_JH791975.1
3907; Streptococcus pneumoniae strain type strain: N, whole genome shotgun
sequence; 950938054; NZ_CIHL01000007.1
3908; Bacillus census VD142 actaa-supercont2.2, whole genome shotgun
sequence; 514340871; NZ_KE150045.1
3909; Bacillus census BAG6O-2 supercont1.1, whole genome shotgun
sequence; 423468694; NZ_JH804628.1
3910; Bacillus mycoides FSLH7-687 Contig052, whole genome shotgun
sequence; 727271768; NZ_ASPY01000052.1
3911; Bacillus census HuA2-9 acqVt-supercont1.1, whole genome shotgun
sequence; 507020427; NZ_KB976152.1
3912; Bacillus census HuA4-10 supercont1.1, whole genome shotgun
sequence; 423520617; NZ_JH792148.1
3913; Bacillus census MC67 supercont1.2, whole genome shotgun sequence;
423557538; NZ_JH792114.1
3914; Bacillus census AH621 chromosome, whole genome shotgun sequence;
238801471; NZ_CM000719.1
3915; Bacillus census VD107 supercont1.1, whole genome shotgun sequence;
423609285; NZ_JH792232.1
3916; Bacillus census VDM034 supercont1.1, whole genome shotgun
sequence; 423666303; NZ_JH791809.1
3917; Bacillus cereus BAG5X1-1 supercont1.1, whole genome shotgun
sequence; 423451256; NZ_JH791996.1
3918; Enterococcus faecalis strain P9-1 scaffold484.1, whole genome shotgun
sequence; 949763393; NZ_LKGS01000484.1
3919; Clostridium butyricum 5521 gcontig_1106103650482, whole genome
shotgun sequence; 182420360; NZ_ABDT01000120.2
3920; Rhodobacter sphaeroides WS8N chromosome chrI, whole genome
shotgun sequence; 332561612; NZ_CM001161.1
3921; Methylosinus trichosporium OB3b MettrDRAFT_Contig_106_C, whole
genome shotgun sequence; 639846426; NZ_ADVE02000001.1
3922; Streptomyces clavuligerus ATCC 27064 supercont1.55, whole genome
shotgun sequence; 254392242; NZ_DS570678.1
3923; Streptomyces rimosus subsp. rimosus strain NRRL B-16073 contig48.1,
whole genome shotgun sequence; 696497741; NZ_JNWX01000048.1
3924; Streptomyces rimosus subsp. rimosus ATCC 10970 contig00333, whole
genome shotgun sequence; 441178796; NZ_ANSJ01000259.1
3925; Streptomyces viridochromogenes DSM 40736 supercont1.1, whole
genome shotgun sequence; 224581107; NZ_GG657757.1
3926; Streptomyces viridochromogenes DSM 40736 supercont1.1, whole
genome shotgun sequence; 224581107; NZ_GG657757.1
3927; Methanobacterium formicicum DSM 3637 Contig04, whole genome
shotgun sequence; 408381849; NZ_AMPO01000004.1
3928; Methanobacterium formicicum DSM 3637 Contig04, whole genome
shotgun sequence; 408381849; NZ_AMPO01000004.1
3929; Sphingobium yanoikuyae strain SHJ scaffold2, whole genome shotgun
sequence; 893711333; NZ_KQ235984.1
3930; Streptomyces mobaraensis NBRC 13819 = DSM 40847 contig024,
whole genome shotgun sequence; 458977979; NZ_AORZ01000024.1
3931; Streptomyces mobaraensis NBRC 13819 = DSM 40847 contig079,
whole genome shotgun sequence; 458984960; NZ_AORZ01000079.1
3932; Amycolatopsis azurea DSM 43854 contig60, whole genome shotgun
sequence; 451338568; NZ_ANMG01000060.1
3933; Streptomyces pristinaespiralis ATCC 25486 chromosome, whole
genome shotgun sequence; 297189896; NZ_CM000950.1
3934; Xanthomonas citri pv. punicae str. LMG 859, whole genome shotgun
sequence; 390991205; NZ_CAGJ01000031.1
3935; Streptomyces sp. CNS654 CD02DRAFT_scaffold00023.23_C, whole
genome shotgun sequence; 695856316; NZ_JNLT01000024.1
3936; Mesorhizobium amorphae CCNWGS0123 contig00204, whole genome
shotgun sequence; 357028583; NZ_AGSN01000187.1
3937; Leptolyngbya sp. PCC 7375 Lepto7375DRAFT_LPA.5, whole genome
shotgun sequence; 427415532; NZ_JH993797.1
3938; Streptomyces auratus AGR0001 Scaffold1, whole genome shotgun
sequence; 398790069; NZ_JH725387.1
3939; Streptomyces auratus AGR0001 Scaffold1_85, whole genome shotgun
sequence; 396995461; AJGV01000085.1
3940; Paenibacillus dendritiformis C454 PDENDC1000064, whole genome
shotgun sequence; 374605177; NZ_AHKH01000064.1
3941; Halosimplex carlsbadense 2-9-1 contig_4, whole genome shotgun
sequence; 448406329: NZ_AOIU01000004.1
3942; Amycolatopsis decaplanina DSM 44594 Contig0055, whole genome
shotgun sequence; 458848256; NZ_AOHO01000055.1
3943; Fictibacillus macauensis ZFHKF-1 Contig20, whole genome shotgun
sequence; 392955666; NZ_AKKV01000020.1
3944; Streptomyces sviceus ATCC 29083 chromosome, whole genome
shotgun sequence; 297196766; NZ_CM000951.1
3945; Paenibacillus sp. Aloe-11 GW8_15, whole genome shotgun sequence;
375307420; NZ_JH601049.1
3946; Streptomyces sp. W007 contig00293, whole genome shotgun sequence;
365867746; NZ_AGSW01000272.1
3947; Frankia saprophytica strain CN3 FrCN3DRAFT_FCB.2, whole genome
shotgun sequence; 652876473; NZ_KI912267.1
3948; Desulfosporosinus youngiae DSM 17734 chromosome, whole genome
shotgun sequence; 374578721; NZ_CM001441.1
3949; Moorea producens 3L scf52054, whole genome shotgun sequence;
332710503; NZ_GL890955.1
3950; Pedobacter sp. BAL39 1103467000500, whole genome shotgun
sequence; 149277003; NZ_ABCM01000004.1
3951; Pedobacter sp. BAL39 1103467000492, whole genome shotgun
sequence; 149277373; NZ_ABCM01000005.1
3952; Sulfurovum sp. AR contig00449, whole genome shotgun sequence;
386284588; NZ_AJLE01000006.1
3953; Mucilaginibacter paludis DSM 18603 chromosome, whole genome
shotgun sequence; 373951708; NZ_CM001403.1
3954; Magnetospirillum caucaseum strain SO-1 contig00006, whole genome
shotgun sequence; 458904467; NZ_AONQ01000006.1
3955; Moorea producens 3L scf52052, whole genome shotgun sequence;
332710285; NZ_GL890953.1
3956; Cecembia lonarensis LW9 contig000133, whole genome shotgun
sequence; 406663945; NZ_AMGM01000133.1
3957; Actinomyces sp. oral taxon 848 str. F0332 Scfld0, whole genome
shotgun sequence; 260447107; NZ_GG703879.1
3958; Actinomyces sp. oral taxon 848 str. F0332 Scfld0, whole genome
shotgun sequence; 260447107; NZ_GG703879.1
3959; Streptomyces ipomoeae 91-03 gcontig_1108499710267, whole genome
shotgun sequence; 429195484; NZ_AEJC01000118.1
3960; Streptomyces ipomoeae 91-03 gcontig_1108499715961, whole genome
shotgun sequence; 429196334; NZ_AEJC01000180.1
3961; Frankia sp. QA3 chromosome, whole genome shotgun sequence;
392941286; NZ_CM001489.1
3962; Fischerella thermalis PCC 7521 contig00099, whole genome shotgun
sequence; 484076371; NZ_AJLL01000098.1
3963; Rhodobacter sp. AKP1 contig19, whole genome shotgun sequence;
429208285; NZ_ANFS01000019.1
3964; Streptomyces chartreusis NRRL 12338 12338_Doro1_scaffold19,
whole genome shotgun sequence; 381200190; NZ_JH164855.1
3965; Streptomyces globisporus C-1027 Scaffold24_1, whole genome shotgun
sequence; 410651191; NZ_AJUO01000171.1
3966; Sphingobium yanoikuyae XLDN2-5 contig000029, whole genome
shotgun sequence; 378759075; NZ_AFXE01000029.1
3967; Paenibacillus peoriae KCTC 3763 contig9, whole genome shotgun
sequence; 389822526; NZ_AGFX01000048.1
3968; Citromicrobium sp. JLT1363 contig00009, whole genome shotgun
sequence; 341575924; NZ_AEUE01000009.1
3969; Acaryochloris sp. CCMEE 5410 contig00232, whole genome shotgun
sequence; 359367134; NZ_AFEJ01000154.1
3970; Pseudomonas extremaustralis 14-3 substr. 14-3b strain 14-3
contig00001, whole genome shotgun sequence; 394743069;
NZ_AHIP01000001.1
3971; Lunatimonas lonarensis strain AK24 S14_contig_18, whole genome
shotgun sequence; 499123840; NZ_AQHR01000021.1
3972; Mesorhizobium japonicum R7A MesloDRAFT_Scaffold1.1, whole
genome shotgun sequence; 696358903; NZ_KI632510.1
3973; Legionella pneumophila subsp. pneumophila ATCC 43290, complete
genome; 378775961; NC_016811.1
3974; Methylococcus capsulatus str. Texas = ATCC 19069 strain Texas
contig0129, whole genome shotgun sequence; 483090991;
NZ_AMCE01000064.1
3975; Thermobifida fusca TM51 contig028, whole genome shotgun sequence;
510814910; NZ_AOSG01000028.1
3976; Rhodospirillum rubrum F11, complete genome; 386348020;
NC_017584.1
3977; Rhodospirillum rubrum F11, complete genome; 386348020;
NC_017584.1
3978; Rhodospirillum rubrum F11, complete genome; 386348020;
NC_017584.1
3979; Hahella chejuensis KCTC 2396, complete genome; 83642913;
NC_007645.1
3980; Frankia sp. Thr ThrDRAFT_scaffold_28.29, whole genome shotgun
sequence; 602262270; JENI01000029.1
3981; Novosphingobium aromaticivorans DSM 12444, complete genome;
87198026; NC_007794.1
3982; Roseobacter denitrificans OCh 114, complete genome; 110677421;
NC_008209.1
3983; Pelobacter propionicus DSM 2379, complete genome; 118578449;
NC_008609.1
3984; Psychromonas ingrahamii 37, complete genome; 119943794;
NC_008709.1
3985; Rhodobacter sphaeroides ATCC 17029 chromosome 1, complete
sequence; 126460778; NC_009049.1
3986; Rhodobacter sphaeroides ATCC 17025, complete genome; 146276058;
NC_009428.1
3987; Geobacter uraniireducens Rf4, complete genome; 148262085;
NC_009483.1
3988; Sphingomonas wittichii RW1, complete genome; 148552929;
NC_009511.1
3989; Sulfurovum sp. NBC37-1 genomic DNA, complete genome;
152991597; NC_009663.1
3990; Acaryochloris marina MBIC11017, complete genome; 158333233;
NC_009925.1
3991; Bacillus weihenstephanensis KBAB4, complete genome; 163938013;
NC_010184.1
3992; Bifidobacterium longum subsp. infantis ATCC 15697, complete
genome; 213690928; NC_011593.1
3993; Cyanothece sp. PCC 7425, complete genome; 220905643;
NC_011884.1
3994; Streptococcus suis 98HAH33, complete genome; 145690656;
CP000408.1
3995; Chitinophaga pinensis DSM 2588, complete genome; 256419057;
NC_013132.1
3996; Rhodothermus marinus DSM 4252, complete genome; 268315578;
NC_013501.1
3997; Sanguibacter keddieii DSM 10542, complete genome; 269793358;
NC_013521.1
3998; Thermobaculum terrenum ATCC BAA-798 chromosome 1, complete
sequence; 269925123; NC_013525.1
3999; Thermobaculum terrenum ATCC BAA-798 chromosome 2, complete
sequence; 269838913; NC_013526.1
4000; Xylanimonas cellulosilytica DSM 15894, complete genome;
269954810; NC_013530.1
4001; Salinibacter ruber M8 chromosome, complete genome; 294505815;
NC_014032.1
4002; Salinibacter ruber M8 chromosome, complete genome; 294505815;
NC_014032.1
4003; Legionella pneumophila 2300/99 Alcoy, complete genome; 296105497;
NC_014125.1
4004; Amycolatopsis mediterranei S699, complete genome; 384145136;
NC_017186.1
4005; Butyrivibrio proteoclasticus B316 chromosome 1, complete sequence;
302669374; NC_014387.1
4006; Gallionella capsiferriformans ES-2, complete genome; 302877245;
NC_014394.1
4007; Paenibacillus polymyxa E681, complete genome; 864439741;
NC_014483.2
4008; Paenibacillus polymyxa 1-43 S143_contig00221, whole genome
shotgun sequence; 647225094; NZ_ASRZ01000173.1
4009; Mesorhizobium ciceri CMG6 MescicDRAFT_scaffold_1.2_C, whole
genome shotgun sequence; 639162053; NZ_AWZS01000002.1
4010; Terriglobus saanensis SP1PR4, complete genome; 320105246;
NC_014963.1
4011; Syntrophobotulus glycolicus DSM 8271, complete genome; 325288201;
NC_015172.1
4012; Methanobacterium lacus strain AL-21, complete genome; 325957759;
NC_015216.1
4013; Marinomonas mediterranea MMB-1, complete genome; 326793322;
NC_015276.1
4014; Desulfobacca acetoxidans DSM 11109, complete genome; 328951746;
NC_015388.1
4015; Methylomonas methanica MC09, complete genome; 333981747;
NC_015572.1
4016; Methylomonas methanica MC09, complete genome; 333981747;
NC_015572.1
4017; Methanobacterium paludis strain SWAN1, complete genome;
333986242; NC_015574.1
4018; Mycobacterium sinense strain JDM601, complete genome; 333988640;
NC_015576.1
4019; Frankia coriariae strain BMG5.1 scaffold41.42, whole genome shotgun
sequence; 827465632; NZ_JWIO01000042.1
4020; Halopiger xanaduensis SH-6 plasmid pHALXA01, complete genome;
336251750; NC_015658.1
4021; Mesorhizobium opportunistum WSM2075, complete genome;
337264537;NC_015675.1
4022; Runella slithyformis DSM 19594, complete genome; 338209545;
NC_015703.1
4023; Roseobacter litoralis Och 149, complete genome; 339501577;
NC_015730.1
4024; Streptomyces violaceusniger Tu 4113 plasmid pSTRVI01, complete
sequence; 345007457; NC_015951.1
4025; Streptomyces violaceusniger Tu 4113, complete genome; 345007964;
NC_015957.1
4026; Rhodothermus marinus SG0.5JP17-172, complete genome; 345301888;
NC_015966.1
4027; Chloracidobacterium thermophilum B chromosome 1, complete
sequence; 347753732; NC_016024.1
4028; Kitasatospora setae KM-6054 DNA, complete genome; 357386972;
NC_016109.1
4029; Streptomyces bingchenggensis BCW-1, complete genome; 374982757;
NC_016582.1
4030; Desulfosporosinus orientis DSM 765, complete genome; 374992780;
NC_016584.1
4031; Desulfosporosinus orientis DSM 765, complete genome; 374992780;
NC_016584.1
4032; Paenibacillus terrae HPL-003, complete genome; 374319880;
NC_016641.1
4033; Bacillus megaterium WSH-002. complete genome; 384044176;
NC_017138.1
4034; Francisella cf. novicida 3523, complete genome; 387823583;
NC_017449.1
4035; Streptomyces cattleya str. NRRL 8057 main chromosome, complete
genome; 357397620; NC_016111.1
4036; Streptococcus salivarius JIM8777 complete genome; 387783149;
NC_017595.1
4037; Actinoplanes sp. SE50/110, complete genome; 386845069;
NC_017803.1
4038; Tistrella mobilis KA081020-065 plasmid pTM1, complete sequence;
442559580; NC_017957.2
4039; Tistrella mobilis KA081020-065 plasmid pTM3, complete sequence;
389874236; NC_017958.1
4040; Tistrella mobilis KA081020-065 plasmid pTM3, complete sequence;
389874236; NC_017958.1
4041; Legionella pneumophila subsp. pneumophila str. Lorraine chromosome,
complete genome; 397662556; NC_018139.1
4042; Nocardiopsis sp. TP-A0876 strain NBRC 110039, whole genome
shotgun sequence; 754924215; NZ_BAZE01000001.1
4043; Emticicia oligotrophica DSM 17448, complete genome; 408671769;
NC_018748.1
4044; Saccharothrix espanaensis DSM 44229 complete genome; 433601838;
NC_019673.1
4045; Saccharothrix espanaensis DSM 44229 complete genome; 433601838;
NC_019673.1
4046; Nostoc sp. PCC 7107, complete genome; 427705465; NC_019676.1
4047; Nostoc sp. PCC 7107, complete genome; 427705465; NC_019676.1
4048; Rivularia sp. PCC 7116, complete genome; 427733619; NC_019678.1
4049; Rivularia sp. PCC 7116, complete genome; 427733619; NC_019678.1
4050; Synechococcus sp. PCC 6312, complete genome; 427711179;
NC_019680.1
4051; Synechococcus sp. PCC 6312, complete genome; 427711179;
NC_019680.1
4052; Nostoc sp. PCC 7524, complete genome; 427727289; NC_019684.1
4053; Calothrix sp. PCC 6303, complete genome; 428296779; NC_019751.1
4054; Crinalium epipsammum PCC 9333, complete genome; 428303693;
NC_019753.1
4055; Thermobacillus composti KWC4, complete genome; 430748349;
NC_019897.1
4056; Mesorhizobium sp. LNHC220B00 scaffold0002, whole genome
shotgun sequence; 563576979; NZ_AYWS01000002.1
4057; Bacillus sp. 1NLA3E, complete genome; 488570484; NC_021171.1
4058; Streptomyces davawensis strain JCM 4913 complete genome;
471319476; NC_020504.1
4059; Streptomyces davawensis strain JCM 4913 complete genome;
471319476; NC_020504.1
4060; Desulfotomaculum acetoxidans DSM 771, complete genome;
258513366; NC_013216.1
4061; Desulfotomaculum acetoxidans DSM 771, complete genome;
258513366; NC_013216.1
4062; Actinosynnema minim DSM 43827, complete genome; 256374160;
NC_013093.1
4063; Bacillus cereus BAG2O-3 acfXF-supercont1.1, whole genome shotgun
sequence; 507017505; NZ_KB976530.1
4064; Bacillus cereus HuA3-9 acqVv-supercont1.4, whole genome shotgun
sequence; 507024338; NZ_KB976146.1
4065; Bacillus cereus VD118 acrHo-supercont1.9, whole genome shotgun
sequence; 507035131; NZ_KB976800.1
4066; Bacillus cereus VDM006 acrHb-supercont1.1, whole genome shotgun
sequence; 507060269; NZ_KB976864.1
4067; Bacillus cereus VDM019 achrj-supercont1.2, whole genome shotgun
sequence; 507056808; NZ_KB976199.1
4068; Bacillus cereus VDM053 acrGS-supcrcont1.7, whole genome shotgun
sequence; 507060152; NZ_KB976714.1
4069; Halomonas anticariensis FP35 = DSM 16096 strain FP35 Scaffold1,
whole genome shotgun sequence; 514429123; NZ_KE332377.1
4070; Streptomyces sp. NRRL F-5917 contig68.1, whole genome shotgun
sequence; 663414324; NZ_JOHQ01000068.1
4071; Streptomyces aurantiacus JA 4570 Seq17, whole genome shotgun
sequence; 514916021; NZ_AOPZ01000017.1
4072; Streptomyces aurantiacus JA 4570 Seq63, whole genome shotgun
sequence; 514917321; NZ_AOPZ01000063.1
4073; Streptomyces aurantiacus JA 4570 Seq109, whole genome shotgun
sequence; 514918665; NZ_AOPZ01000109.1
4074; Paenibacillus polymyxa OSY-DF Contig136, whole genome shotgun
sequence; 484036841; NZ_AIPP01000136.1
4075; Fischerella muscicola SAG 1427-1 = PCC 73103 contig00215, whole
genome shotgun sequence; 484073367; NZ_AJLJ01000207.1
4076; Fischerella muscicola PCC 7414 contig00109, whole genome shotgun
sequence; 484075173; NZ_AJLK01000109.1
4077; Fischerella muscicola PCC 7414 contig00153, whole genome shotgun
sequence; 484075372; NZ_AJLK01000153.1
4078; Pedobacter arcticus A12 Scaffold2, whole genome shotgun sequence;
484345004; NZ_JH947126.1
4079; Leptolyngbya boryana PCC 6306 LepboDRAFT_LPC.1, whole
genome shotgun sequence; 482909028; NZ_KB731324.1
4080; Mastigocladus laminosus UU774 scaffold_22, whole genome shotgun
sequence; 764671177; NZ_JXIJ01000139.1
4081; Fischerella sp. PCC 9339 PCC9339DRAFT_scaffold1.1, whole genome
shotgun sequence; 482909394; NZ_JH992898.1
4082; Lactococcus garvieae Tac2 Tac2Contig_33, whole genome shotgun
sequence; 483258918; NZ_AMFE01000033.1
4083; Paenisporosarcina sp. TG-14 111.TG14.1_1, whole genome shotgun
sequence; 483299154; NZ_AMGD01000001.1
4084; Paenibacillus sp. ICGEB2008 Contig_7, whole genome shotgun
sequence; 483624383; NZ_AMQU01000007.1
4085; Amphibacillus jilinensis Y1 Scaffold2, whole genome shotgun
sequence; 483992405; NZ_JH976435.1
4086; Nocardiopsis alba DSM 43377 contig_34, whole genome shotgun
sequence; 484007204; NZ_ANAC01000034.1
4087; Nocardiopsis halophila DSM 44494 contig_138, whole genome shotgun
sequence; 484007841; NZ_ANAD01000138.1
4088; Nocardiopsis halophila DSM 44494 contig_138, whole genome shotgun
sequence; 484007841; NZ_ANAD01000138.1
4089; Nocardiopsis halophila DSM 44494 contig_197, whole genome shotgun
sequence; 484008051; NZ_ANAD01000197.1
4090; Nocardiopsis baichengensis YIM 90130 Scaffold15_1, whole genome
shotgun sequence; 484012558; NZ_ANAS01000033.1
4091; Nocardiopsis halotolerans DSM 44410 contig_26, whole genome
shotgun sequence; 484015294; NZ_ANAX01000026.1
4092; Nocardiopsis salina YIM 90010 contig_204, whole genome shotgun
sequence; 484023808; NZ_ANBF01000204.1
4093; Nocardiopsis chromatogenes YIM 90109 contig_59, whole genome
shotgun sequence; 484026076; NZ_ANBH01000059.1
4094; Nocardiopsis chromatogenes YIM 90109 contig_93, whole genome
shotgun sequence; 484026206; NZ_ANBH01000093.1
4095; Porphyrobacter sp. AAP82 Contig35, whole genome shotgun sequence;
484033307; NZ_ANFX01000035.1
4096; Blastomonas sp. AAP53 Contig14, whole genome shotgun sequence;
484033631;NZ_ANFZ01000014.1
4097; Paenibacillus sp. PAMC 26794 5104_29, whole genome shotgun
sequence; 484070054; NZ_ANHX01000029.1
4098; Oscillatoria sp. PCC 10802 Osc10802DRAFT_Contig7.7, whole
genome shotgun sequence; 484104632; NZ_KB235948.1
4099; Clostridium botulinum CB11/1-1 CB_contig000105, whole genome
shotgun sequence; 484141779; NZ_AORM01000006.1
4100; Actinopolyspora halophila DSM 43834 ActhaDRAFT_contig1.1_C,
whole genome shotgun sequence; 484203522; NZ_AQUI01000002.1
4101; Streptomyces sp. FxanaC1 B074DRAFT_scaffold_1.2_C, whole
genome shotgun sequence; 484227180; NZ_AQWO01000002.1
4102; Smaragdicoccus niigatensis DSM44881 = NBRC 103563 strain DSM
44881 F600DRAFT_scaffold00011.11_C, whole genome shotgun sequence;
484234624; NZ_AQXZ01000009.1
4103; Verrucomicrobium sp. 3C A37ADRAFT_scaffold1.1, whole genome
shotgun sequence; 483219562; NZ_KB901875.1
4104; Verrucomicrobium sp. 3C A37ADRAFT_scaffold1.1, whole genome
shotgun sequence; 483219562; NZ_KB901875.1
4105; Ancylobacter sp. FA202 A3M1DRAFT_scaffold1.1, whole genome
shotgun sequence; 483720774; NZ_KB904818.1
4106; Filamentous cyanobacterium ESFC-1 A3MYDRAFT_scaffold1.1,
whole genome shotgun sequence; 483724571; NZ_KB904821.1
4107; Streptomyces sp. CcalMP-8W B053DRAFT_scaffold_17.18, whole
genome shotgun sequence; 483961830; NZ_KB890924.1
4108; Streptomyces sp. ScaeMP-e10 B061DRAFT_scaffold_0.1, whole
genome shotgun sequence; 483967534; NZ_KB891296.1
4109; Streptomyces sp. CNB091 D581DRAFT_scaffold00010.10, whole
genome shotgun sequence; 484070161; NZ_KB898999.1
4110; Streptomyces sp. TOR3209 Contig613, whole genome shotgun
sequence; 484867902; NZ_AGNH01000613.1
4111; Bacillus oceanisediminis 2691 contig2644, whole genome shotgun
sequence; 485048843; NZ_ALEG01000067.1
4112; Bacillus sp. REN51N contig 2, whole genome shotgun sequence;
748816024; NZ_JXAB01000002.1
4113; Calothrix sp. PCC 7103 Cal7103DRAFT_CPM.6, whole genome
shotgun sequence; 485067373; NZ_KB217478.1
4114; Pseudanabaena sp. PCC 6802 Pse6802_scaffold_5, whole genome
shotgun sequence; 485067426; NZ_KB235914.1
4115; Actinomadura atramentaria DSM 43919 strain SF2197
G339DRAFT_scaffold00002.2, whole genome shotgun sequence; 485090585;
NZ_KB907209.1
4116; Novispirillum itersonii subsp. itersonii ATCC 12639
G365DRAFT_scaffold00001.1, whole genome shotgun sequence; 485091510;
NZ_KB907337.1
4117; Novispirillum itersonii subsp. itersonii ATCC 12639
G365DRAFT_scaffold00001.1, whole genome shotgun sequence; 485091510;
NZ_KB907337.1
4118; Paenibacillus polymyxa ATCC 842 PPt02_scaffold1, whole genome
shotgun sequence; 485269841; NZ_GL905390.1
4119; Streptomyces sp. SolWspMP-sol2th B083DRAFT_scaffold_17.18_C,
whole genome shotgun sequence; 654969845; NZ_ARPF01000020.1
4120; Mesorhizobium huakuii 7653Rgenome; 657121522; CP006581.1
4121; Paenibacillus sp. HW567 B212DRAFT_scaffold1.1, whole genome
shotgun sequence; 486346141; NZ_KB910518.1
4122; Bacillus sp. 123MFChir2 H280DRAFT_scaffold00030.30, whole
genome shotgun sequence; 487368297; NZ_KB910953.1
4123; Streptomyces canus 299MFChir4.1 H293DRAFT_scaffold00032.32,
whole genome shotgun sequence; 487385965; NZ_KB911613.1
4124; Nocardiopsis potens DSM 45234 contig 25, whole genome shotgun
sequence; 484017897; NZ_ANBB01000025.1
4125; Kribbella catacumbae DSM 19601 A3ESDRAFT_scaffold_7.8_C,
whole genome shotgun sequence; 484207511; NZ_AQUZ01000008.1
4126; Paenibacillus riograndensis SBR5 Contig78, whole genome shotgun
sequence; 485470216; NZ_A
4127; Lamprocystis purpurea DSM 4197 A39ODRAFT_scaffold_0.1, whole
genome shotgun sequence; 483254584; NZ_KB902362.1
4128; Nonomuraea coxensis DSM 45129 A3G7DRAFT_scaffold_4.5, whole
genome shotgun sequence; 483454700; NZ_KB903974.1
4129; Spirosoma spitsbergense DSM 19989 B157DRAFT_scaffold_76.77,
whole genome shotgun sequence; 483994857; NZ_KB893599.1
4130; Amycolatopsis benzoatilytica AK 16/65 AmybeDRAFT_scaffold1.1,
whole genome shotgun sequence; 486399859; NZ_KB912942.1
4131; Amycolatopsis nigrescens CSC17Ta-90 AmyniDRAFT_Contig68.1_C,
whole genome shotgun sequence; 487404592; NZ_ARVW01000001.1
4132; Amycolatopsis nigrescens CSC17Ta-90 AmyniDRAFT_Contig68.1_C,
whole genome shotgun sequence; 487404592; NZ_ARVW01000001.1
4133; Reyranella massiliensis 521, whole genome shotgun sequence;
484038067; NZ_HE997181.1
4134; Acidobacteriaceae bacterium KBS 83 G002DRAFT_scaffold00007.7,
whole genome shotgun sequence; 485076323; NZ_KB906739.1
4135; Paenibacillus alvei A6-6i-x PAAL66ix_14, whole genome shotgun
sequence; 528200987; ATMS01000061.1
4136; Dehalobacter sp. UNSWDHB Contig_139, whole genome shotgun
sequence; 544905305; NZ_AUUR01000139.1
4137; Thermoactinomyces vulgaris strain NRRL F-5595 F5595contig15.1,
whole genome shotgun sequence; 929862756; NZ_LGKI01000090.1
4138; Clostridium saccharobutylicum DSM 13864, complete genome;
550916528; NC_022571.1
4139; Butyrivibrio fibrisolvens AB2020 G616DRAFT_scaffold00015.15_C,
whole genome shotgun sequence; 551012921; NZ_ATVZ01000015.1
4140; Butyrivibrio sp. XPD2006 G590DRAFT_scaffold00008.8_C, whole
genome shotgun sequence; 551021553; NZ_ATVT01000008.1
4141; Acidobacteriaceae bacterium TAA166 strain TAA 166
H979DRAFT_scaffold_0.1_C, whole genome shotgun sequence; 551216990;
NZ_ATWD01000001.1
4142; Acidobacteriaceae bacterium TAA166 strain TAA 166
H979DRAFT_scaffold_0.1_C, whole genome shotgun sequence; 551216990;
NZ_ATWD01000001.1
4143; Leptolyngbya sp. Heron Island J 50, whole genome shotgun sequence;
553739852; NZ_AWNH01000066.1
4144; Leptolyngbya sp. Heron Island J 50, whole genome shotgun sequence;
553739852; NZ_AWNH01000066.1
4145; Leptolyngbya sp. Heron Island J 67, whole genome shotgun sequence;
553740975; NZ_AWNH01000084.1
4146; Rothia aeria F0184 R_aeriaHMPREF0742-1.0_Cont136.4, whole
genome shotgun sequence; 551695014; AXZG01000035.1
4147; Gloeobacter kilaueensis JS1, complete genome; 554634310;
NC_022600.1
4148; Gloeobacter kilaueensis JS1, complete genome; 554634310;
NC_022600.1
4149; Asticcacaulis sp. AC466 contig00033, whole genome shotgun sequence;
557835508; NZ_AWGE01000033.1
4150; Streptomyces niveus NCIMB 11891 contig00003, whole genome
shotgun sequence; 558542923; AWQW01000003.1
4151; Streptomyces roseochromogenus subsp. oscitans DS 12.976
chromosome, whole genome shotgun sequence; 566155502;
NZ_CM002285.1
4152; Streptomyces roseochromogenus subsp. oscitans DS 12.976
chromosome, whole genome shotgun sequence; 566155502;
NZ_CM002285.1
4153; Bacillus boroniphilus JCM 21738 DNA, contig: contig_6, whole
genome shotgun sequence; 571146044; BAUW01000006.1
4154; Mesorhizobium sp. LSJC285A00 scaffold0007, whole genome shotgun
sequence; 563442031; NZ_AYVK01000007.1
4155; Mesorhizobium sp. LSJC277A00 scaffold0014, whole genome shotgun
sequence; 563459186; NZ_AYVM01000014.1
4156; Mesorhizobium sp. LNJC405B00 scaffold0005, whole genome shotgun
sequence; 563523441; NZ_AYWC01000005.1
4157; Mesorhizobium sp. LSJC265A00 scaffold0015, whole genome shotgun
sequence; 563472037; NZ_AYVP01000015.1
4158; Mesorhizobium sp. LSHC426A00 scaffold0005, whole genome shotgun
sequence; 563492715; NZ_AYVV01000005.1
4159; Mesorhizobium sp. LNHC232B00 scaffold0020, whole genome
shotgun sequence; 563561985; NZ_AYWP01000020.1
4160; Mesorhizobium sp. L48C026A00 scaffold0030, whole genome shotgun
sequence; 563848676; NZ_AYWU01000030.1
4161; Mesorhizobium sp. L2C089B000 scaffold0011, whole genome shotgun
sequence; 563888034; NZ_AYWV01000011.1
4162; Mesorhizobium sp. L2C084A000 scaffold0007, whole genome shotgun
sequence; 563938926; NZ_AYWX01000007.1
4163; Clostridium pasteurianum NRRL B-598, complete genome; 930593557;
NZ_CP011966.1
4164; Paenibacillus polymyxa CR1, complete genome; 734699963;
NC_023037.2
4165; Clostridium butyricum DORA_1 Q607_CBUC00058, whole genome
shotgun sequence; 566226100; AZLX01000058.1
4166; Streptococcus suis strain LS8F, whole genome shotgun sequence;
766589647; NZ_CEHJ01000007.1
4167; Mycobacterium sp. UM_Kg27 contig000002, whole genome shotgun
sequence; 809025315; NZ_JRMM01000002.1
4168; Mycobacterium iranicum UM_TJL Contig_42, whole genome shotgun
sequence; 638987534; NZ_AUWT01000042.1
4169; Paenibacillus sp. MAEPY2 contig7, whole genome shotgun sequence;
639451286;NZ_AWUK01000007.1
4170; Verrucomicrobia bacterium LP2A
G346DRAFT_scf7180000000012_quiver.2_C, whole genome shotgun
sequence; 640169055; NZ_JAFS01000002.1
4171; Verrucomicrobia bacterium LP2A
G346DRAFT_scf7180000000012_quiver.2_C, whole genome shotgun
sequence; 640169055; NZ_JAFS01000002.1
4172; Bacillus mannanilyticus JCM 10596, whole genome shotgun sequence;
640600411; NZ_BAMO01000071.1
4173; Bifidobacterium breve NCFB 2258, complete genome; 749295448;
NZ_CP006714.1
4174; Haloglycomyces albus DSM 45210 HalalDRAFT_chromosome1.1_C,
whole genome shotgun sequence; 644043488; NZ_AZUQ01000001.1
4175; Kutzneria albida strain NRRL B-24060 contig305.1, whole genome
shotgun sequence; 662161093; NZ_JNYH01000515.1
4176; Kutzneria albida strain NRRL B-24060 contig305.1, whole genome
shotgun sequence; 662161093; NZ_JNYH01000515.1
4177; Kutzneria albida DSM 43870, complete genome; 754862786;
NZ_CP007155.1
4178; Paenibacillus sp. 1-49 S149_contig00281, whole genome shotgun
sequence; 647230448; NZ_ASRY01000102.1
4179; Paenibacillus graminis RSA19 S2_contig00597, whole genome shotgun
sequence; 647256651; NZ_ASSG01000304.1
4180; Paenibacillus sp. 1-18 S118_contig00103, whole genome shotgun
sequence; 647269417; NZ_ASSB01000031.1
4181; Paenibacillus polymyxa TD94 STD94_contig00759, whole genome
shotgun sequence; 647274605; NZ_ASSA01000134.1
4182; Bacillus flexus T6186-2 contig_106, whole genome shotgun sequence;
647636934; NZ_JANV01000106.1
4183; Mastigocladopsis repens PCC 10914 Mas10914DRAFT_scaffold1.1,
whole genome shotgun sequence; 482909462; NZ_JH992901.1
4184; Streptomyces sp. FxanaC1 B074DRAFT_scaffold_7.8_C, whole
genome shotgun sequence; 484227195; NZ_AQWO01000008.1
4185; Streptomyces sp. HmicA12 B072DRAFT_scaffold_19.20, whole
genome shotgun sequence; 483972948; NZ_KB891808.1
4186; Butyrivibrio sp. XPD2002 G587DRAFT_scaffold00011.11, whole
genome shotgun sequence; 651381584; NZ_KE384117.1
4187; Butyrivibrio sp. NC3005 G634DRAFT_scaffold00001.1, whole
genome shotgun sequence; 651394394; NZ_KE384206.1
4188; Paenarthrobacter nicotinovorans 231Sha2.1M6
I960DRAFT_scaffold00004.4_C, whole genome shotgun sequence;
651445346; NZ_AZVC01000006.1
4189; Bacillus sp. J37 BacJ37DRAFT_scaffold_0.1_C, whole genome
shotgun sequence; 651516582; NZ_JAEK01000001.1
4190; Bacillus sp. UNC437CL72CviS29 M014DRAFT_scaffold00009.9_C,
whole genome shotgun sequence; 651596980; NZ_AXVB01000011.1
4191; Bacillus bogoriensis ATCC BAA-922
T323DRAFT_scaffold00008.8_C, whole genome shotgun sequence;
651937013; NZ_JHYI01000013.1
4192; Bacillus kribbensis DSM 17871 H539DRAFT_scaffold00003.3, whole
genome shotgun sequence; 651983111; NZ_KE387239.1
4193; Fischerella sp. PCC 9431 Fis9431DRAFT_Scaffold1.2, whole genome
shotgun sequence; 652326780; NZ_KE650771.1
4194; Fischerella sp. PCC 9605 FIS9605DRAFT_scaffold2.2, whole genome
shotgun sequence; 652337551; NZ_KI912149.1
4195; Clostridium akagii DSM 12554 BR66DRAFT_scaffold00010.10_C,
whole genome shotgun sequence; 652488076; NZ_JMLK01000014.1
4196; Clostridium beijerinckii HUN142 T483DRAFT_scaffold00004.4, whole
genome shotgun sequence; 652494892; NZ_KK211337.1
4197; Mesorhizobium sp. URHA0056 H959DRAFT_scaffold00004.4_C,
whole genome shotgun sequence; 652670206; NZ_AUEL01000005.1
4198; Mesorhizobium loti R88b Meslo2DRAFT_Scaffold1.1, whole genome
shotgun sequence; 652688269; NZ_KI912159.1
4199; Mesorhizobium ciceri WSM4083 MESCI2DRAFT_scaffold_0.1,
whole genome shotgun sequence; 652698054; NZ_KI912610.1
4200; Mesorhizobium sp. URHC0008 N549DRAFT_scaffold00001.1_C,
whole genome shotgun sequence; 652699616; NZ_JIAP01000001.1
4201; Mesorhizobium erdmanii USDA 3471 A3AUDRAFT_scaffold_7.8_C,
whole genome shotgun sequence; 652719874; NZ_AXAE01000013.1
4202; Mesorhizobium loti CJ3sym A3A9DRAFT_scaffold_25.26_C, whole
genome shotgun sequence; 652734503; NZ_AXAL01000027.1
4203; Cohnella thermotolerans DSM 17683
G485DRAFT_scaffold00041.41_C, whole genome shotgun sequence;
652787974; NZ_AUCP01000055.1
4204; Mesorhizobium sp. WSM3626 Mesw3626DRAFT_scaffold_6.7_C,
whole genome shotgun sequence; 652879634; NZ_AZUY01000007.1
4205; Mesorhizobium sp. WSM1293 MesloDRAFT_scaffold_4.5, whole
genome shotgun sequence; 652910347; NZ_KI911320.1
4206; Mesorhizobium sp. WSM3224 YU3DRAFT_scaffold_3.4_C, whole
genome shotgun sequence; 652912253; NZ_AIY001000004.1
4207; Butyrivibrio fibrisolvens MD2001 G635DRAFT_scaffold00033.33_C,
whole genome shotgun sequence; 652963937; NZ_AUKD01000034.1
4208; Legionella pneumophila subsp. pneumophila strain ATCC 33155
contig032, whole genome shotgun sequence; 652971687;
NZ_JFIN01000032.1
4209; Legionella pneumophila subsp. pneumophila strain ATCC 33154
Scaffold2, whole genome shotgun sequence; 653016013; NZ_KK074241.1
4210; Legionella pneumophila subsp. pneumophila strain ATCC 33823
Scaffold7. whole genome shotgun sequence; 653016661; NZ_KK074199.1
4211; Bacillus sp. URHB0009 H980DRAFT_scaffold00016.16_C, whole
genome shotgun sequence; 653070042; NZ_AUER01000022.1
4212; Lachnospira multipara ATCC 19207 G600DRAFT_scaffold00009.9_C,
whole genome shotgun sequence; 653218978; NZ_AUJG01000009.1
4213; Streptomyces sp. CNH099 B121DRAFT_scaffold_16.17_C, whole
genome shotgun sequence; 654239557; NZ_AZWL01000018.1
4214; Desulfatiglans anilini DSM 4660 H567DRAFT_scaffold00005.5_C,
whole genome shotgun sequence; 654868823; NZ_AULM01000005.1
4215; Legionella pneumophila subsp. fraseri strain ATCC 35251 contig031,
whole genome shotgun sequence; 654928151; NZ_JFIG01000031.1
4216; Bacillus sp. FJAT-14578 Scaffold2, whole genome shotgun sequence;
654948246; NZ_KI632505.1
4217; Bacillus sp. 278922_107 H622DRAFT_scaffold00001.1, whole genome
shotgun sequence; 654964612; NZ_KI911354.1
4218; Ruminococcus flavefaciens ATCC 19208
L870DRAFT_scaffold00001.1, whole genome shotgun sequence; 655069822;
NZ_KI912489.1
4219; Paenibacillus taiwanensis DSM 18679
H509DRAFT_scaffold00010.10_C, whole genome shotgun sequence;
655095554; NZ_AULE01000001.1
4220; Paenibacillus sp. UNC451MF BP97DRAFT_scaffold0008.18_C,
whole genome shotgun sequence; 655103160; NZ_JMLS01000021.1
4221; Paenibacillus pinihumi DSM 23905 = JCM 16419 strain DSM 23905
H583DRAFT_scaffold00005.5, whole genome shotgun sequence; 655115689;
NZ_KE383867.1
4222; Paenibacillus harenae DSM 16969 H581DRAFT_scaffold00002.2,
whole genome shotgun sequence; 655165706; NZ_KE383843.1
4223; Shimazuella kribbensis DSM 45090 A3GQDRAFT_scaffold_0.1_C,
whole genome shotgun sequence; 655370026; NZ_ATZF01000001.1
4224; Shimazuella kribbensis DSM 45090 A3GQDRAFT_scaffold_5.6_C,
whole genome shotgun sequence; 655371438; NZ_ATZF01000006.1
4225; Streptomyces flavidovirens DSM 40150
G412DRAFT_scaffold00007.7_C, whole genome shotgun sequence;
655414006; NZ_AUBE01000007.1
4226; Streptomyces flavidovirens DSM 40150
G412DRAFT_scaffold00009.9, whole genome shotgun sequence; 655416831;
NZ_KE386846.1
4227; Azospirillum halopraeferens DSM 3675
G472DRAFT_scaffold00039.39_C, whole genome shotgun sequence;
655967838; NZ_AUCF01000044.1
4228; Clostridium scatologenes strain ATCC 25775, complete genome;
802929558; NZ_CP009933.1
4229; Paenibacillus harenae DSM 16969 H581DRAFT_scaffold00004.4,
whole genome shotgun sequence; 656245934; NZ_KE383845.1
4230; Paenibacillus alginolyticus DSM 5050 = NBRC 15375 strain DSM 5050
G519DRAFT_scaffold00043.43_C, whole genome shotgun sequence;
656249802; NZ_AUGY01000047.1
4231; Paenibacillus alginolyticus DSM 5050 = NBRC 15375 strain DSM 5050
G519DRAFT_scaffold00043.43_C, whole genome shotgun sequence;
656249802; NZ_AUGY01000047.1
4232; Bacillus indicus strain DSM 16189 Contig01, whole genome shotgun
sequence; 737222016; NZ_JNVC02000001.1
4233; Bacillus sp. RP1137 contig_18, whole genome shotgun sequence;
657210762; NZ_AXZS01000018.1
4234; Streptomyces leeuwenhoekii strain C34(2013) c34_sequence_0012,
whole genome shotgun sequence; 657294764; NZ_AZSD01000012.1
4235; Streptomyces leeuwenhoekii strain C34(2013) c34_sequence_0041,
whole genome shotgun sequence; 657295264; NZ_AZSD01000040.1
4236; Streptomyces leeuwenhoekii strain C58 contig69, whole genome
shotgun sequence; 873282617; NZ_LFEH01000068.1
4237; Bacillus thuringiensis LM1212 scaffold_08, whole genome shotgun
sequence; 657629081; NZ_AYPV01000024.1
4238; Paenibacillus polymyxa strain WLY78 S6_contig00095, whole genome
shotgun sequence; 657719467; NZ_ALJV01000094.1
4239; [Scytonema hofmanni] UTEX 2349 Tol9009DRAFT_TPD.8, whole
genome shotgun sequence; 657935980; NZ_KK073768.1
4240; Sphingomonas sp. DC-6 scaffold87, whole genome shotgun sequence;
662140302; NZ_JMUB01000087.1
4241; Streptomyces lavendulae strain Fujisawa #8006 contig417.1, whole
genome shotgun sequence; 662043624; NZ_JNXL01000469.1
4242; Streptomyces sp. NRRL WC-3773 contig36.1, whole genome shotgun
sequence; 664487325; NZ_JOJI01000036.1
4243; Streptomyces flavotricini strain NRRL B-5419 contig237.1, whole
genome shotgun sequence; 662063073; NZ_JNXV01000303.1
4244; Streptomyces peruviensis strain NRRL ISP-5592
P181_Doro1_scaffold152, whole genome shotgun sequence; 662097244;
NZ_KL575165.1
4245; Streptomyces natalensis ATCC 27448 Scaffold_33, whole genome
shotgun sequence; 764439507; NZ_JRKI01000027.1
4246; Streptomyces decoyicus strain NRRL ISP-5087
P056_Doro1_scaffold78, whole genome shotgun sequence; 662133033;
NZ_KL570321.1
4247; Streptomyces baarnensis strain NRRL B-2842 P144_Doro1_scaffold26,
whole genome shotgun sequence; 662135579; NZ_KL573564.1
4248; Streptomyces vinaceus strain NRRL ISP-5257 contig5.1, whole genome
shotgun sequence; 759527818; NZ_JNYP01000005.1
4249; Spirillospora albida strain NRRL B-3350 contig1.1, whole genome
shotgun sequence; 663122276; NZ_JOFJ01000001.1
4250; Streptomyces sp. NRRL S-455 contig1.1, whole genome shotgun
sequence; 663192162; NZ_JOCT01000001.1
4251; Streptomyces sp. NRRL S-87 contig69.1, whole genome shotgun
sequence; 663169513; NZ_JO
4252; Streptomyces katrae strain NRRL B-16271 contig33.1, whole genome
shotgun sequence; 663300513; NZ_JNZY01000033.1
4253; Streptomyces katrae strain NRRL B-16271 contig37.1, whole genome
shotgun sequence; 663300941; NZ_JNZY01000037.1
4254; Streptomyces sp. NRRL B-3229 contig5.1, whole genome shotgun
sequence; 663316931; NZ_JOGP01000005.1
4255; Streptomyces ruber strain NRRL B-1661 contig94.1, whole genome
shotgun sequence; 663365281; NZ_JODN01000094.1
4256; Streptomyces roseoverticillatus strain NRRL B-3500 contig22.1, whole
genome shotgun sequence; 663372343; NZ_JOFL01000022.1
4257; Streptomyces roseoverticillatus strain NRRL B-3500 contig43.1, whole
genome shotgun sequence; 663373497; NZ_JOFL01000043.1
4258; Streptomyces rimosus subsp. rimosus strain NRRL WC-3869
P248contig20.1, whole genome shotgun sequence; 925322461;
LGCQ01000113.1
4259; Streptomyces sp. NRRL B-12105 contig1.1, whole genome shotgun
sequence; 663380895; NZ_JNZW01000001.1
4260; Streptomyces sp. NRRL S-1448 contig 134.1, whole genome shotgun
sequence; 663421576; NZ_JOGE01000134.1
4261; Allokutzneria albata strain NRRL B-24461 contig22.1, whole genome
shotgun sequence; 663596322; NZ_JOEF01000022.1
4262; Herbidospora cretacea strain NRRL B-16917 contig7.1, whole genome
shotgun sequence; 663670981; NZ_JODQ01000007.1
4263; Nocardia sp. NRRL WC-3656 contig2.1, whole genome shotgun
sequence; 663737675; NZ_JOJF01000002.1
4264; Streptomyces aureocirculatus strain NRRL ISP-5386 contig11.1, whole
genome shotgun sequence; 664013282; NZ_JOAP01000011.1
4265; Streptomyces cyaneofuscatus strain NRRL B-2570 contig9.1, whole
genome shotgun sequence; 664021017; NZ_JOEM01000009.1
4266; Streptomyces aureocirculatus strain NRRL ISP-5386 contig49.1, whole
genome shotgun sequence; 664026629; NZ_JOAP01000049.1
4267; Streptomyces sclerotialus strain NRRL B-2317 contig7.1, whole genome
shotgun sequence; 664034500; NZ_JODX01000007.1
4268; Streptomyces anulatus strain NRRL B-2873 contig21.1, whole genome
shotgun sequence; 664049400; NZ_JOEZ01000021.1
4269; Streptomyces globisporus subsp. globisporus strain NRRL B-2709
contig24.1, whole genome shotgun sequence; 664051798;
NZ_JNZK01000024.1
4270; Streptomyces rimosus subsp. rimosus strain NRRL B-2660 contig14.1,
whole genome shotgun sequence; 664052786; NZ_JOES01000014.1
4271; Streptomyces achromogenes subsp. achromogenes strain NRRL B-2120
contig2.1, whole genome shotgun sequence; 664063830;
NZ_JODT01000002.1
4272; Streptomyces rimosus subsp. rimosus strain NRRL B-2660 contig124.1,
whole genome shotgun sequence; 664066234; NZ_JOES01000124.1
4273; Streptomyces rimosus subsp. rimosus strain NRRL WC-3927 contig5.1,
whole genome shotgun sequence; 664091759; NZ_JOBO01000005.1
4274; Streptomyces rimosus subsp. rimosus strain NRRL WC-3904
contig10.1, whole genome shotgun sequence; 664126885;
NZ_JOCQ01000010.1
4275; Streptomyces rimosus subsp. rimosus strain NRRL WC-3904
contig106.1, whole genome shotgun sequence; 664141810;
NZ_JOCQ01000106.1
4276; Streptomyces sp. NRRL F-2295 P395contig79.1, whole genome
shotgun sequence; 926288193; NZ_LGCY01000146.1
4277; Streptomyces lavenduligriseus strain NRRL ISP-5487 contig2.1, whole
genome shotgun sequence; 664244706; NZ_JOBD01000002.1
4278; Streptomyces lavenduligriseus strain NRRL ISP-5487 contig2.1, whole
genome shotgun sequence; 664244706; NZ_JOBD01000002.1
4279; Streptomyces alboniger strain NRRL B-1832 B-1832_contig_384,
whole genome shotgun sequence; 943899498; NZ_LIQN01000384.1
4280; Streptomyces sp. NRRL S-337 contig31.1, whole genome shotgun
sequence; 664275807; NZ_JOIX01000031.1
4281; Streptomyces sp. NRRL S-337 contig41.1, whole genome shotgun
sequence; 664277815; NZ_JOIX01000041.1
4282; Streptomyces hygroscopicus subsp. hygroscopicus strain NRRL B-1477
contig8.1, whole genome shotgun sequence; 664299296;
NZ_JOIK01000008.1
4283; Streptomyces sp. NRRL F-4474 contig32.1, whole genome shotgun
sequence; 664323078; NZ_JOIB01000032.1
4284; Streptomyces sp. NRRL S-475 contig32.1, whole genome shotgun
sequence; 664325162; NZ_JOJB01000032.1
4285; Streptomyces sp. NRRL S-1868 contig54.1, whole genome shotgun
sequence; 664360925; NZ_JOGD01000054.1
4286; Streptomyces sp. NRRL S-646 contig23.1, whole genome shotgun
sequence; 664421883; NZ_JODC01000023.1
4287; Streptomyces sp. NRRL S-1813 contig13.1, whole genome shotgun
sequence; 664466568; NZ_JOHB01000013.1
4288; Streptomyces sp. NRRL WC-3773 contig2.1, whole genome shotgun
sequence; 664478668; NZ_JOJI01000002.1
4289; Streptomyces sp. NRRL WC-3773 contig11.1, whole genome shotgun
sequence; 664481891; NZ_JOJI01000011.1
4290; Streptomyces sp. NRRL WC-3773 contig36.1, whole genome shotgun
sequence; 664487325; NZ_JOJI01000036.1
4291; Streptomyces olivaceus strain NRRL B-3009 contig20.1, whole genome
shotgun sequence; 664523889; NZ_JOFH01000020.1
4292; Streptomyces sp. NRRL F-5702 contig3.1, whole genome shotgun
sequence; 664537198; NZ_JOHD01000003.1
4293; Streptomyces ochraceiscleroticus strain NRRL ISP-5594 contig9.1,
whole genome shotgun sequence; 664540649; NZ_JOAX01000009.1
4294; Streptomyces sp. NRRL S-118 P205_Doro1_scaffold2, whole genome
shotgun sequence; 664556736; NZ_KL591003.1
4295; Streptomyces sp. NRRL WC-3641 P206_Doro1_scaffold18, whole
genome shotgun sequence; 664607641; NZ_KL579016.1
4296; Streptomyces sp. NRRL S-623 contig14.1, whole genome shotgun
sequence; 665522165; NZ_JOJC01000016.1
4297; Streptomyces sp. NRRL WC-3719 contig152.1, whole genome shotgun
sequence; 665536304; NZ_JOCD01000152.1
4298; Streptomyces duihamensis strain NRRL B-3309 contig3.1, whole
genome shotgun sequence; 665586974; NZ_JNXR01000003.1
4299; Streptomyces duihamensis strain NRRL B-3309 contig23.1, whole
genome shotgun sequence; 665604093; NZ_JNXR01000023.1
4300; Bacillus sp. MB2021 T349DRAFT_scaffold00010.10_C, whole
genome shotgun sequence; 671553628; NZ_JNJJ01000011.1
4301; Lachnospira multipara LB2003 T537DRAFT_scaffold00010.10_C,
whole genome shotgun sequence; 671578517; NZ_JNKW01000011.1
4302; Clostridium drakei strain SL1 contig_20, whole genome shotgun
sequence; 692121046; NZ_JIBU02000020.1
4303; Rhodococcus fascians A21d2 contig10, whole genome shotgun
sequence; 739287390; NZ_JMFA01000010.1
4304; Streptomyces alboviridis strain NRRL B-1579 contig18.1, whole
genome shotgun sequence; 695845602; NZ_JNWU01000018.1
4305; Streptomyces sp. JS01 contig2, whole genome shotgun sequence;
695871554; NZ_JPWW01000002.1
4306; Streptomyces albus subsp. albus strain NRRL B-16041 contig28.1,
whole genome shotgun sequence; 695870063; NZ_JNWW01000028.1
4307; Streptomyces rimosus subsp. rimosus strain NRRL B-16073 contig7.1,
whole genome shotgun sequence; 696493030; NZ_JNWX01000007.1
4308; Streptomyces peucetius strain NRRL WC-3868 contig49.1, whole
genome shotgun sequence; 665671804; NZ_JOCK01000052.1
4309; Blautia producta strain ER3 contig 8, whole genome shotgun sequence;
696661199; NZ_JPJF01000008.1
4310; Streptomyces albus subsp. albus strain NRRL B-1811 contig32.1, whole
genome shotgun sequence; 665618015; NZ_JODR01000032.1
4311; Streptomyces lydicus strain NRRL ISP-5461 contig41.1, whole genome
shotgun sequence; 702808005; NZ_JNZA01000041.1
4312; Streptomyces iakyrus strain NRRL ISP-5482 contig6.1, whole genome
shotgun sequence; 702914619; NZ_JNXI01000006.1
4313; Kibdelosporangium aridum subsp. largum strain NRRL B-24462
contig91.4, whole genome shotgun sequence; 703243970;
NZ_JNYM01001429.1
4314; Streptomyces galbus strain KCCM 41354 contig00021, whole genome
shotgun sequence; 716912366; NZ_JRHJ01000016.1
4315; Bacillus aryabhattai strain GZ03 contig1_scaffold1, whole genome
shotgun sequence; 723602665; NZ_JPIE01000001.1
4316; Bacillus cereus R309803 chromosome, whole genome shotgun
sequence; 238801472; NZ_CM000720.1
4317; Bacillus cereus AH603 chromosome, whole genome shotgun sequence;
238801489; NZ_CM000737.1
4318; Sphingomonas sp. 37zxx contig3_scaffold2, whole genome shotgun
sequence; 728813405; NZ_JROH01000003.1
4319; Lachnospira multipara MC2003 T520DRAFT_scaffold00007.7_C,
whole genome shotgun sequence; 653225243; NZ_JHWY01000011.1
4320; Bacillus sp. 72 T409DRAFT_scf7180000000077_quiver.15_C, whole
genome shotgun sequence; 736160933; NZ_JQMI01000015.1
4321; Bacillus simplex BA2H3 scaffold2, whole genome shotgun sequence;
736214556; NZ_KN360955.1
4322; Bacillus manliponensis strain JCM 15802 contig4, whole genome
shotgun sequence; 736629899; NZ_JOTN01000004.1
4323; Bacillus vietnamensis strain HD-02, whole genome shotgun sequence;
736762362; NZ_CCDN010000009.1
4324; Erythrobacter longus strain DSM 6997 contig9, whole genome shotgun
sequence; 736965849; NZ_JMIW01000009.1
4325; Calothrix sp. 336/3, complete genome; 821032128; NZ_CP011382.1
4326; Desulfobacter vibrioformis DSM 8776
Q366DRAFT_scaffold00036.35_C, whole genome shotgun sequence;
737257311; NZ_JQKJ01000036.1
4327; Actinokineospora spheciospongiae strain EG49 contig1268_1, whole
genome shotgun sequence; 737301464; NZ_AYXG01000139.1
4328; Bacillus firmus DS1 scaffold33, whole genome shotgun sequence;
737350949; NZ_APVL01000034.1
4329; Bacillus hemicellulosilyticus JCM 9152, whole genome shotgun
sequence; 737360192; NZ_BAUU01000008.1
4330; Edaphobacter aggregans DSM 19364
Q363DRAFT_scaffold00032.32_C, whole genome shotgun sequence;
737370143; NZ_JQKI01000040.1
4331; Halobacillus sp. BBL2006 cont444, whole genome shotgun sequence;
737576092; NZ_JRNX01000441.1
4332; Bacillus akibai JCM 9157, whole genome shotgun sequence;
737696658; NZ_BAUV01000025.1
4333; Frankia sp. CeD CEDDRAFT_scaffold_22.23, whole genome shotgun
sequence; 737947180; NZ_JPGU01000023.1
4334; Fusobacterium necrophorum BFIR-2 contig0075, whole genome
shotgun sequence; 737951550; NZ_JAAG01000075.1
4335; [Leptolyngbya] sp. JSC-1
Osccy1DRAFT_CYJSC1_DRAF_scaffold00069.1, whole genome shotgun
sequence; 738050739; NZ_KL662191.1
4336; Lysobacter daejeonensis GH1-9 contig23, whole genome shotgun
sequence; 738180952; NZ_AVPU01000014.1
4337; Mastigocoleus testarum BC008 Contig-2, whole genome shotgun
sequence; 959926096; NZ_LMTZ01000085.1
4338; Myxosarcina sp. GI1 contig_5, whole genome shotgun sequence;
738529722; NZ_JRFE01000006.1
4339; Paenibacillus sp. FSL H7-689 Contig015, whole genome shotgun
sequence; 738716739; NZ_ASPU01000015.1
4340; Paenibacillus sp. FSL R7-269 Contig022, whole genome shotgun
sequence; 738803633; NZ_ASPS01000022.1
4341; Paenibacillus sp. FSL R7-277 Contig088, whole genome shotgun
sequence; 738841140; NZ_ASPX01000088.1
4342; Prevotella oryzae DSM 17970 XylorDRAFT_XOA.1, whole genome
shotgun sequence; 738999090; NZ_KK073873.1
4343; Rothia dentocariosa strain C6B contig_5, whole genome shotgun
sequence; 739372122; NZ_JQHE01000003.1
4344; Ruminococcus albus 8 contig00035, whole genome shotgun sequence;
325680876; NZ_ADKM02000123.1
4345; Amycolatopsis orientalis DSM 40040 = KCTC 9412 contig 32, whole
genome shotgun sequence; 499136900; NZ_ASJB01000015.1
4346; Streptococcus salivarius strain NU10 contig_11, whole genome shotgun
sequence; 739748927; NZ_JJMT01000011.1
4347; Streptomyces griseorubens strain JSD-1 contig143, whole genome
shotgun sequence; 657284919; JJMG01000143.1
4348; Streptomyces avermitilis MA-4680 = NBRC 14893, complete genome;
162960844; NC_003155.4
4349; Streptomyces avermitilis MA-4680 = NBRC 14893, complete genome;
162960844; NC_003155.4
4350; Streptomyces aurantiacus JA 4570 Seq28, whole genome shotgun
sequence; 514916412; NZ_AOPZ01000028.1
4351; Streptomyces griseus subsp. griseus strain NRRL WC-3645 contig39.1,
whole genome shotgun sequence; 739830131; NZ_JOJE01000039.1
4352; Streptomyces griseus subsp. griseus strain NRRL WC-3645 contig40.1,
whole genome shotgun sequence; 739830264; NZ_JOJE01000040.1
4353; Streptomyces scabiei strain NCPPB 4086 scf_65433_365.1, whole
genome shotgun sequence; 739854483; NZ_KL997447.1
4354; Streptomyces sp. FXJ7.023 Contig10, whole genome shotgun sequence;
510871397; NZ_APIV01000010.1
4355; Streptomyces sp. NRRL F-5053 contig1.1, whole genome shotgun
sequence; 664356765; NZ_JOHT01000001.1
4356; Streptomyces viridochromogenes Tue57 Seq127, whole genome
shotgun sequence; 443625867; NZ_AMLP01000127.1
4357; Streptomyces sp. Tu 6176 scaffold00003, whole genome shotgun
sequence; 740044478; NZ_KK106990.1
4358; Streptomyces toyocaensis strain NRRL 15009 contig00064, whole
genome shotgun sequence; 740092143; NZ_JFCB01000064.1
4359; Streptomyces sp. PRh5 contig001, whole genome shotgun sequence;
740097110; NZ_JABQ01000001.1
4360; Tolypothrix bouteillei VB521301 scaffold_1, whole genome shotgun
sequence; 910242069; NZ_JHEG02000048.1
4361; Thioclava indica strain DT23-4 contig29, whole genome shotgun
sequence; 740292158; NZ_AUNB01000028.1
4362; Streptomyces albulus strain NK660, complete genome; 754221033;
NZ_CP007574J
4363; Paenibacillus sp. FSLH7-0357, complete genome; 749299172;
NZ_CP009241.1
4364; Paenibacillus stellifer strain DSM 14472, complete genome; 753871514;
NZ_CP009286.1
4365; Brevundimonas nasdae strain TPW30 Contig_13, whole genome
shotgun sequence; 746187665; NZ_JWSY01000013.1
4366; Paenibacillus polymyxa strain DSM 365 Contig001, whole genome
shotgun sequence; 746220937; NZ_JMIQ01000001.1
4367; Paenibacillus sp. IHB B 3415 contig_069, whole genome shotgun
sequence; 746258261; NZ_JUEI01000069.1
4368; Streptomyces sp. 769, complete genome; 749181963; NZ_CP003987.1
4369; Hassallia byssoidea VB512170 scaffold_0, whole genome shotgun
sequence; 748181452; NZ_JTCM01000043.1
4370; Hassallia byssoidea VB512170 scaffold_0, whole genome shotgun
sequence; 748181452; NZ_JTCM01000043.1
4371; Jeotgalibacillus malaysiensis strain D5 chromosome, complete genome;
749182744; NZ_CP009416.1
4372; Paenibacillus sp. FSL R7-0273, complete genome; 749302091;
NZ_CP009283.1
4373; Paenibacillus jamilae strain NS115 contig_27, whole genome shotgun
sequence; 970428876; NZ_LDRX01000027.1
4374; Streptomonospora alba strain YIM 90003 contig_9, whole genome
shotgun sequence; 749673329; NZ_JROO01000009.1
4375; Actinobaculum sp. oral taxon 183 str. F0552 A_P1HMPREF0043-
1.0_Cont1.1, whole genome shotgun sequence; 541476958;
AWSB01000006.1
4376; Actinobaculum sp. oral taxon 183 str. F0552 Scaffold15, whole genome
shotgun sequence; 545327527; NZ_KE951412.1
4377; Actinobaculum sp. oral taxon 183 str. F0552 A_P1HMPREF0043-
1.0_Cont15.2, whole genome shotgun sequence; 541473965;
AWSB01000041.1
4378; Nocardia transvalensis NBRC 15921, whole genome shotgun sequence;
485125031; NZ_BAGL01000055.1
4379; Xenococcus sp. PCC 7305 scaffold00124, whole genome shotgun
sequence; 443325429; NZ_ALVZ01000124.1
4380; Mesorhizobium sp. ORS3324, whole genome shotgun sequence;
751265275; NZ_CCMY01000220.1
4381; Mesorhizobium plurifarium, whole genome shotgun sequence;
751292755; NZ_CCNE01000004.1
4382; Mesorhizobium sp. SOD10, whole genome shotgun sequence;
751285871; NZ_CCNA01000001.1
4383; Tolypothrix campylonemoides VB511288 scalfold_0, whole genome
shotgun sequence; 751565075; NZ_JXCB01000004.1
4384; Jeotgalibacillus campisalis strain SF-57 contig00001, whole genome
shotgun sequence; 751586078; NZ_JXRR01000001.1
4385; Jeotgalibacillus soli strain P9 contig00009, whole genome shotgun
sequence; 751619763; NZ_JXRP01000009.1
4386; Cylindrospermum stagnate PCC 7417, complete genome; 434402184;
NC_019757.1
4387; Bacillus sp. 1NLA3E, complete genome; 488570484; NC_021171.1
4388; Tistrella mobilis KA081020-065, complete genome; 389875858;
NC_017956.1
4389; Stackebrandtia nassauensis DSM 44728, complete genome; 291297538;
NC_013947.1
4390; Magnetospirillum gryphiswaldense MSR-1, WORKING DRAFT
SEQUENCE, 373 unordered pieces; 144897097; CU459003.1
4391; Clostridium beijerinckii strain NCIMB 14988 genome; 754484184;
NZ_CP010086.1
4392; Frankia alni str. ACN14A chromosome, complete sequence;
111219505; NC_008278.1
4393; Streptomyces sp. NBRC 110027, whole genome shotgun sequence;
754788309; NZ_BBNO01000002.1
4394; Streptomyces sp. NBRC 110027, whole genome shotgun sequence;
754796661; NZ_BBNO01000008.1
4395; Paenibacillus sp. FSL R7-0331, complete genome; 754821094;
NZ_CP009284.1
4396; Kibdelosporangium sp. MJ126-NF4, whole genome shotgun sequence;
754819815; NZ_CDME01000002.1
4397; Paenibacillus camerounensis strain G4, whole genome shotgun
sequence; 754841195; NZ_CCDG010000069.1
4398; Paenibacillus borealis strain DSM 13188, complete genome;
754859657; NZ_CP009285.1
4399; Streptacidiphilus neutrinimicus strain NBRC 100921, whole genome
shotgun sequence; 755016073; NZ_BBPO01000030.1
4400; Streptacidiphilus melanogenes strain NBRC 103184, whole genome
shotgun sequence; 755032408; NZ_BBPP01000024.1
4401; Streptacidiphilus anmyonensis strain NBRC 103185, whole genome
shotgun sequence; 755077919; NZ_BBPQ01000048.1
4402; Streptacidiphilus jiangxiensis strain NBRC 100920, whole genome
shotgun sequence; 755108320; NZ_BBPN01000056.1
4403; Mesorhizobium sp. ORS3359, whole genome shotgun sequence;
756828038; NZ_CCNC01000143.1
4404; Aneurinibacillus migulanus strain Nagano E1 contig_36, whole genome
shotgun sequence; 928874573; NZ_LIXL01000208.1
4405; Bifidobacterium reuteri DSM 23975 Contig04, whole genome shotgun
sequence; 672991374; JGZK01000004.1
4406; Streptomyces luteus strain TRM 45540 Scaffold1, whole genome
shotgun sequence; 759659849; NZ_KN039946.1
4407; Streptomyces nodosus strain ATCC 14899 genome; 759739811;
NZ_CP009313.1
4408; Streptomyces fradiae strain ATCC 19609 contig0008, whole genome
shotgun sequence; 759752221; NZ_JNAD01000008.1
4409; Streptomyces glaucescens strain GLA.O, complete genome; 759802587;
NZ_CP009438.1
4410; Nonomuraea Candida strain NRRL B-24552 contig8.1, whole genome
shotgun sequence; 759934284; NZ_JOAG01000009.1
4411; Nonomuraea Candida strain NRRL B-24552 contig28.1, whole genome
shotgun sequence; 759944490; NZ_JOAG01000030.1
4412; Nonomuraea Candida strain NRRL B-24552 contig42.1, whole genome
shotgun sequence; 759948103; NZ_JOAG01000045.1
4413; Streptomyces fulvissimus DSM 40593, complete genome; 488607535;
NC_021177.1
4414; Microcystis aeruginosa PCC 9807, whole genome shotgun sequence;
425454132; NZ_HE973326.1
4415; Streptomyces natalensis ATCC 27448 Scaffold_46, whole genome
shotgun sequence; 764442321; NZ_JRKI01000041.1
4416; Streptomyces iranensis genome assembly Siranensis, scaffold
SCAF00002; 765016627; NZ_LK022849.1
4417; Risungbinella massiliensis strain GD1, whole genome shotgun sequence;
765315585; NZ_LN812103.1
4418; Paenibacillus terrae strain NRRL B-30644 contig00007, whole genome
shotgun sequence; 765319397; NZ_JTHP01000007.1
4419; Streptococcus suis strain LS8I, whole genome shotgun sequence;
766595491; NZ_CEHM01000004.1
4420; Bacillus mycoides strain 11kri323 LG56_082, whole genome shotgun
sequence; 765533368; NZ_JYCJ01000082.1
4421; Paenibacillus polymyxa strain NRRL B-30509 contig00003, whole
genome shotgun sequence; 766607514; NZ_JTHO01000003.1
4422; Frankia sp. CpI1-P FF86 1013, whole genome shotgun sequence;
946950294; NZ_LJJX01000013.1
4423; Streptococcus suis strain B28P, whole genome shotgun sequence;
769231516; NZ_CDTB01000010.1
4424; Lachnospiraceae bacterium NK4A144
G619DRAFT_scaffold00002.2_C, whole genome shotgun sequence;
652826657; NZ_AUJT01000002.1
4425; Lechevalieria aerocolonigenes strain NRRL B-16140 contig11.3, whole
genome shotgun sequence; 772744565; NZ_JYJG01000059.1
4426; Streptomyces sp. NRRL F-4428 contig40.2, whole genome shotgun
sequence; 772774737; NZ_JYJI01000131.1
4427; Streptomyces sp. FxanaA7 F611DRAFT_scaffold00041.41_C, whole
genome shotgun sequence; 780340655; NZ_LACL01000054.1
4428; Streptomyces rubellomurinus strain ATCC 31215 contig-63, whole
genome shotgun sequence; 783211546; NZ_JZKH01000064.1
4429; Streptomyces rubellomurinus subsp. indigofems strain ATCC 31304
contig-55, whole genome shotgun sequence; 783374270;
NZ_JZKG01000056.1
4430; Elstera litoralis strain Dia-1 c21, whole genome shotgun sequence;
788026242; NZ_LAJY01000021.1
4431; Streptomyces sp. NRRL B-1568 contig-76, whole genome shotgun
sequence; 799161588; NZ_JZWZ01000076.1
4432; Sphingomonas sp. SRS2 contig40, whole genome shotgun sequence;
806905234; NZ_LARW01000040.1
4433; Paenibacillus wulumuqiensis strain Y24 Scaffold4, whole genome
shotgun sequence; 808051893; NZ_KQ040793.1
4434; Paenibacillus dauci strain H9 Scaffold3, whole genome shotgun
sequence; 808064534; NZ_KQ040798.1
4435; Spirosoma radiotolerans strain DG5A, complete genome; 817524426;
NZ_CP010429.1
4436; Allosalinactinospora lopnorensis strain CA15-2 contig00044, whole
genome shotgun sequence; 815863894; NZ_LAJC01000044.1
4437; Allosalinactinospora lopnorensis strain CA15-2 contig00053, whole
genome shotgun sequence; 815864238; NZ_LAJC01000053.1
4438; Bacillus sp. SA1-12 scf7180000003378, whole genome shotgun
sequence; 817541164; NZ_LATZ01000026.1
4439; Altererythrobacter atlanticus strain 26DY36, complete genome;
927872504; NZ_CP011452.2
4440; Streptomyces lydicus A02, complete genome; 822214995;
NZ_CP007699.1
4441; Streptomyces lydicus A02, complete genome; 822214995;
NZ_CP007699.1
4442; Bacillus census strain B4147 NODE_5, whole genome shotgun
sequence; 822530609; NZ_LCYN01000004.1
4443; Erythrobacter luteus strain KA37 contig1, whole genome shotgun
sequence; 822631216; NZ_LBHB01000001.1
4444; Erythrobacter marinus strain HWDM-33 contig3, whole genome
shotgun sequence; 823659049; NZ_LBHU01000003.1
4445; Streptomyces sp. KE1 Contig11, whole genome shotgun sequence;
825353621; NZ_LAYX01000011.1
4446; Sphingomonas sp. Y57 scaffold74, whole genome shotgun sequence;
826051019; NZ_LDES01000074.1
4447; Alistipes sp. ZOR0009 L990_140, whole genome shotgun sequence;
835319962; NZ_JTLD01000119.1
4448; Bacillus aryabhattai strain T61 Scaffold1, whole genome shotgun
sequence; 836596561; NZ_KQ087173.1
4449; Paenibacillus sp. TCA20, whole genome shotgun sequence; 843088522;
NZ_BBIW01000001.1
4450; Bacillus circulans strain RIT379 contig11, whole genome shotgun
sequence; 844809159; NZ_LDPH01000011.1
4451; Bacillus circulans strain RIT379 contig11, whole genome shotgun
sequence; 844809159; NZ_LDPH01000011.1
4452; Ornithinibacillus californiensis strain DSM 16628 contig_22, whole
genome shotgun sequence; 849059098; NZ_LDUE01000022.1
4453; Bacillus pseudalcaliphilus strain DSM 8725 super11, whole genome
shotgun sequence; 849078078; NZ_LFJO01000006.1
4454; Bacillus aryabhattai strain LK25 16, whole genome shotgun sequence;
850356871; NZ_LDWN01000016.1
4455; Methanobacterium formicicum genome assembly DSM1535,
chromosome: chrI; 851114167; NZ_LN515531.1
4456; Methanobacterium arcticum strain M2
EI99DRAFT_scaffold00005.5_C, whole genome shotgun sequence;
851140085; NZ_JQKN01000008.1
4457; Methanobacterium sp. SMA-27 DL91DRAFT_nitig_0_quiver.1_C,
whole genome shotgun sequence; 851351157; NZ_JQLY01000001.1
4458; Cellulomonas sp. A375-1 contig_129, whole genome shotgun sequence;
856992287; NZ_LFKW01000127.1
4459; Streptomyces sp. HNS054 contig28, whole genome shotgun sequence;
860547590; NZ_LDZX01000028.1
4460; Bacillus census strain RIMV BC 126 212, whole genome shotgun
sequence; 872696015; NZ_LABO01000035.1
4461; Streptomyces leeuwenhoekii strain C58 contig126, whole genome
shotgun sequence; 873282818; NZ_LFEH01000123.1
4462; Bacillus sp. 220 BSPC 1447_75439_1072255, whole genome shotgun
sequence; 880954155; NZ_JVPL01000109.1
4463; Bacillus sp. 522_BSPC 2470_72498_1083579_594_{——}. . ._522_, whole
genome shotgun sequence; 880997761; NZ_JVDT01000118.1
4464; Bacillus sp. 522_BSPC 2470_72498_1083579_594_{——}. . ._522_, whole
genome shotgun sequence; 880997761; NZ_JVDT01000118.1
4465; Streptomyces varsoviensis strain NRRL B-3589 contig2.1, whole
genome shotgun sequence; 664348063; NZ_JOFN01000002.1
4466; Scytonema tolypothrichoides VB-61278 scaffold_6, whole genome
shotgun sequence; 890002594; NZ_JXCA01000005.1
4467; Erythrobacter atlanticus strain s21-N3, complete genome; 890444402;
NZ_CP011310.1
4468; Streptococcus pseudopneumoniae strain 445_SPSE
347_91401_2272315_318_{——}. . ._319_, whole genome shotgun sequence;
896667361; NZ_JVGV01000030.1
4469; Kitasatospora sp. MY 5-36 Contig_703_, whole genome shotgun
sequence; 902792184; NZ_LFVW01000692.1
4470; Streptomyces caatingaensis strain CMAA 1322 contig02, whole genome
shotgun sequence; 906344334; NZ_LFXA01000002.1
4471; Streptomyces caatingaensis strain CMAA 1322 contig07, whole genome
shotgun sequence; 906344339; NZ_LFXA01000007.1
4472; Streptomyces caatingaensis strain CMAA 1322 contig09, whole genome
shotgun sequence; 906344341; NZ_LFXA01000009.1
4473; Candidatus Halobonum tyrrellensis G22 contig00002, whole genome
shotgun sequence; 557371823; NZ_ASGZ01000002.1
4474; Bacillus weihenstephanensis strain JAS 83/3 Bw_JAS-
83/3_contig00005, whole genome shotgun sequence; 910095435;
NZ_JNLY01000005.1
4475; Silvibacterium bohemicum strain S15 contig_3, whole genome shotgun
sequence; 910257956; NZ_LBHJ01000003.1
4476; Silvibacterium bohemicum strain S15 contig_3, whole genome shotgun
sequence; 910257956; NZ_LBHJ01000003.1
4477; Silvibacterium bohemicum strain S15 contig_30, whole genome shotgun
sequence; 910257973; NZ_LBHJ01000020.1
4478; Xanthomonas campestris pv. viticola strain LMG 965, whole genome
shotgun sequence; 704493846; NZ_CBZT010000006.1
4479; Streptomyces baamensis strain NRRL B-2842 P144_Doro1_scaffold6,
whole genome shotgun sequence; 662129456; NZ_KL573544.1
4480; Streptomyces albus subsp. albus strain NRRL B-2445 contig1.1, whole
genome shotgun sequence; 664084661; NZ_JOED01000001.1
4481; Bacillus flexus strain Riq5 contig_32, whole genome shotgun sequence;
914730676; NZ_LFQJ01000032.1
4482; Salinibacter ruber M8 chromosome, complete genome; 294505815;
NC_014032.1
4483; Streptomyces vitaminophilus DSM 41686
A3IGDRAFT_scaffold_10.11, whole genome shotgun sequence; 483682977;
NZ_KB904636.1
4484; Halomonas anticariensis FP35 = DSM 16096 strain FP35 Scaffold1,
whole genome shotgun sequence; 514429123; NZ_KE332377.1
4485; Cohnella thermotolerans DSM 17683 G485DRAFT_scaffold00003.3,
whole genome shotgun sequence; 652794305; NZ_KE386956.1
4486; Streptomyces sp. GXT6 genomic scaffold Scaffold4, whole genome
shotgun sequence; 654975403; NZ_KI601366.1
4487; Verrucomicrobia bacterium LP2A
G346DRAFT_scf7180000000012_quiver.2_C, whole genome shotgun
sequence; 640169055; NZ_JAFS01000002.1
4488; Actinomadura oligospora ATCC 43269
P696DRAFT_scaffold00008.8_C, whole genome shotgun sequence;
651281457; NZ_JADG01000010.1
4489; Actinomadura oligospora ATCC 43269
P696DRAFT_scaffold00008.8_C, whole genome shotgun sequence;
651281457; NZ_JADG01000010.1
4490; Rubellimicrobium mesophilum DSM 19309 scaffold23, whole genome
shotgun sequence; 739419616; NZ_KK088564.1
4491; Pseudonocardia acaciae DSM 45401 N912DRAFT_scaffold00002.2_C,
whole genome shotgun sequence; 655569633; NZ_JIAI01000002.1
4492; Terasakiella pusilia DSM 6293 Q397DRAFT_scaffold00039.39_C,
whole genome shotgun sequence; 655499373; NZ_JHYO01000039.1
4493; Bacillus sp. MB2021 T349DRAFT_scaffold00010.10_C, whole
genome shotgun sequence; 671553628; NZ_JNJJ01000011.1
4494; Streptomyces olindensis strain DAUFPE 5622 103, whole genome
shotgun sequence; 739918964; NZ_JJOH01000097.1
4495; Thioclava dalianensis strain DLFJ1-1 contig2, whole genome shotgun
sequence; 740220529; NZ_JHEH01000002.1
4496; Streptomyces megasporus strain NRRL B-16372 contig19.1, whole
genome shotgun sequence; 671525382; NZ_JODL01000019.1
4497; Streptomyces achromogenes subsp. achromogenes strain NRRL B-2120
contig2.1, whole genome shotgun sequence; 664063830;
NZ_JODT01000002.1
4498; Microbispora rosea subsp. nonnitritogenes strain NRRL B-2631
contig12.1, whole genome shotgun sequence; 663732121;
NZ_JNZQ01000012.1
4499; Streptomyces sp. NRRL S-920 contig36.1, whole genome shotgun
sequence; 664256887; NZ_JODF01000036.1
4500; Streptomyces flavochromogenes strain NRRL B-2684 contig8.1, whole
genome shotgun sequence; 663317502; NZ_JNZO01000008.1
4501; Streptomyces natalensis strain NRRL B-5314 P055_Doro1_scaffold13,
whole genome shotgun sequence; 662108422; NZ_KL570019.1
4502; Bacillus sp. UNC322MFChir4.1 BR72DRAFT_scaffold00004.4, whole
genome shotgun sequence; 737456981; NZ_KN050811.1
4503; Paenibacillus wynnii strain DSM 18334 unitig_2, whole genome
shotgun sequence; 738760618; NZ_JQCR01000002.1
4504; Amycolatopsis sp. MJM2582 contig00007, whole genome shotgun
sequence; 739487309; NZ_JPLW01000007.1
4505; Sphingopyxis fribergensis strain Kp5.2, complete genome; 749188513;
NZ_CP009122.1
4506; Brevundimonas nasdae strain TPW30 Contig_11, whole genome
shotgun sequence; 746187486; NZ_JWSY01000011.1
4507; Microcystis panniformis FACHB-1757, complete genome; 917764592;
NZ_CP011339.1
4508; Desulfocapsa sulfexigens DSM 10523, complete genome; 451945650;
NC_020304.1
4509; Gorillibacterium massiliense strain G5, whole genome shotgun
sequence; 750677319; NZ_CBQR020000171.1
4510; Salinarimonas rosea DSM 21201 G407DRAFT_scaffold00021.21_C,
whole genome shotgun sequence; 655990125; NZ_AUBC01000024.1
4511; Streptomyces sp. NRRL S-118 P205_Doro1_scaffold34, whole genome
shotgun sequence; 664565137; NZ_KL591029.1
4512; Streptomyces glaucescens strain GLA.O, complete genome; 759802587;
NZ_CP009438.1
4513; Paenibacillus sp. FSL R5-0912, complete genome; 754884871;
NZ_CP009282.1
4514; Paenibacillus sp. FSL P4-0081, complete genome; 754777894;
NZ_CP009280.1
4515; Bacillus subtilis subsp. spizizenii RFWG1A4 contig00010, whole
genome shotgun sequence; 764657375; NZ_AJHM01000010.1
4516; Paenibacillus algorifonticola strain XJ259 Scaffold20_1, whole genome
shotgun sequence; 808072221; NZ_LAQO01000025.1
4517; Mycobacterium sp. UM_Kg27 contig000002, whole genome shotgun
sequence; 809025315; NZ_JRMM01000002.1
4518; Mycobacterium sp. UM_Kg1 contig000164, whole genome shotgun
sequence; 809073490; NZ_JRMK01000164.1
4519; Streptomyces avicenniae strain NRRL B-24776 contig3.1, whole
genome shotgun sequence; 919531973; NZ_JOEK01000003.1
4520; Paenibacillus peoriae strain HS311, complete genome; 922052336;
NZ_CP011512.1
4521; Paenibacillus sp. FJAT-27812 scaffold_0, whole genome shotgun
sequence; 922780240; NZ_LIGH01000001.1
4522; Hapalosiphon sp. MRB220 contig_91, whole genome shotgun
sequence; 923076229; NZ_LIRN01000111.1
4523; Bacillus sp. FJAT-21352 Scaffold1, whole genome shotgun sequence;
924654439; NZ_LIUS01000003.1
4524; Bacillus gobiensis strain FJAT-4402 chromosome; 926268043;
NZ_CP012600.1
4525; Streptomyces sp. NRRL B-1140 P439contig15.1, whole genome
shotgun sequence; 926344107; NZ_LGEA01000058.1
4526; Streptomyces sp. NRRL B-1140 P439contig32.1, whole genome
shotgun sequence; 926344331; NZ_LGEA01000105.1
4527; Streptomyces sp. NRRL F-5755 P309contig48.1, whole genome
shotgun sequence; 926371517; NZ_LGCW01000271.1
4528; Streptomyces sp. NRRL F-5755 P309contig50.1, whole genome
shotgun sequence; 926371520; NZ_LGCW01000274.1
4529; Saccharothrix sp. NRRL B-16348 P442contig71.1, whole genome
shotgun sequence; 926395199; NZ_LGED01000246.1
4530; Streptomyces sp. WM6378 P402contig63.1, whole genome shotgun
sequence; 926403453; NZ_LGDD01000321.1
4531; Streptomyces sp. WM6378 P402contig63.1, whole genome shotgun
sequence; 926403453; NZ_LGDD01000321.1
4532; Nocardia sp. NRRL S-836 P437contig3.1b, whole genome shotgun
sequence; 926412094; NZ_LGDY01000103.1
4533; Nocardia sp. NRRL S-836 P437contig39.1, whole genome shotgun
sequence; 926412104; NZ_LGDY01000113.1
4534; Paenibacillus sp. A59 contig_353, whole genome shotgun sequence;
927084730; NZ_LITU01000050.1
4535; Paenibacillus sp. A59 contig_416, whole genome shotgun sequence;
927084736; NZ_LITU01000056.1
4536; Streptomyces sp. NRRL S-444 contig322.4, whole genome shotgun
sequence; 797049078; JZWX01001028.1
4537; Streptomyces chattanoogensis strain NRRL ISP-5002 ISP5002contig8.1,
whole genome shotgun sequence; 928897585; NZ_LGKG01000196.1
4538; Streptomyces chattanoogensis strain NRRL ISP-5002 ISP5002contig9.1,
whole genome shotgun sequence; 928897596; NZ_LGKG01000207.1
4539; Bacillus sp. FJAT-28004 scaffold_2, whole genome shotgun sequence;
929005248; NZ_LGHP01000003.1
4540; Actinobacteria bacterium OK074 ctg60, whole genome shotgun
sequence; 930473294; NZ_LJCV01000275.1
4541; Actinobacteria bacterium OK006 ctg112, whole genome shotgun
sequence; 930490730; NZ_LJCU01000014.1
4542; Actinobacteria bacterium OK006 ctg96, whole genome shotgun
sequence; 930491003; NZ_LJCU01000287.1
4543; Kibdelosporangium phytohabitans strain KLBMP1 111, complete
genome; 931609467; NZ_CP012752.1
4544; Paenibacillus sp. GD6, whole genome shotgun sequence; 939708098;
NZ_LN831198.1
4545; Paenibacillus sp. GD6, whole genome shotgun sequence; 939708105;
NZ_LN831205.1
4546; Alicyclobacillus ferrooxydans strain TC-34 contig_22, whole genome
shotgun sequence; 940346731; NZ_LJCO01000107.1
4547; Streptomyces pactum strain ACT12 scaffold1, whole genome shotgun
sequence; 943388237; NZ_LIQD01000001.1
4548; Streptomyces flocculus strain NRRL B-2465 B2465 contig_205, whole
genome shotgun sequence; 943674269; NZ_LIQO01000205.1
4549; Streptomyces aurantiacus strain NRRL ISP-5412 ISP-5412_contig_138,
whole genome shotgun sequence; 943881150; NZ_LIPP01000138.1
4550; Streptomyces graminilatus strain NRRL B-59124 B59124_contig_7,
whole genome shotgun sequence; 943897669; NZ_LIQQ01000007.1
4551; Streptomyces alboniger strain NRRL B-1832 B-1832_contig_37, whole
genome shotgun sequence; 943898694; NZ_LIQN01000037.1
4552; Streptomyces alboniger strain NRRL B-1832 B-1832_contig_384,
whole genome shotgun sequence; 943899498; NZ_LIQN01000384.1
4553; Streptomyces kanamyceticus strain NRRL B-2535 B-2535_contig_122,
whole genome shotgun sequence; 943922224; NZ_LIQU01000122.1
4554; Streptomyces kanamyceticus strain NRRL B-2535 B-2535_contig_247,
whole genome shotgun sequence; 943922567; NZ_LIQU01000247.1
4555; Streptomyces luridiscabiei strain NRRL B-24455 B24455_contig_315,
whole genome shotgun sequence; 943927948; NZ_LIQV01000315.1
4556; Streptomyces atriruber strain NRRL B-24165 contig_124, whole
genome shotgun sequence; 943949281; NZ_LIPN01000124.1
4557; Streptomyces hirsutus strain NRRL B-2713 B2713 contig_57, whole
genome shotgun sequence; 944005810; NZ_LIQT01000057.1
4558; Streptomyces aureus strain NRRL B-2808 contig_171, whole genome
shotgun sequence; 944012845; NZ_LIPQ01000171.1
4559; Streptomyces prasinus strain NRRL B-12521 B12521_contig_230,
whole genome shotgun sequence; 944020089; NZ_LIPR01000230.1
4560; Streptomyces phaeochromogenes strain NRRL B-1248 B-
1248_contig_126, whole genome shotgun sequence; 944029528;
NZ_LIQZ01000126.1
4561; Streptomyces prasinus strain NRRL B-2712 B2712_contig_323, whole
genome shotgun sequence; 944410649; NZ_LIRH01000323.1
4562; Streptomyces prasinopilosus strain NRRL B-2711 B2711_contig_370,
whole genome shotgun sequence; 944415035; NZ_LIRG01000370.1
4563; Streptomyces torulosus strain NRRL B-3889 B-3889_contig_18, whole
genome shotgun sequence; 944495433; NZ_LIRK01000018.1
4564; Frankia alni str. ACN14A chromosome, complete sequence;
111219505; NC_008278.1
4565; Paenibacillus sp. Leaf72 contig_6, whole genome shotgun sequence;
947378267; NZ_LMLV01000032.1
4566; Sanguibacter sp. Leaf3 contig_2, whole genome shotgun sequence;
947472882; NZ_LMRH01000002.1
4567; Aeromicrobium sp. Root344 contig_1, whole genome shotgun
sequence; 947552260; NZ_LMDH01000001.1
4568; Sphingopyxis sp. Root1497 contig_3, whole genome shotgun sequence;
947689975; NZ_LMGF01000003.1
4569; Sphingopyxis sp. Root1497 contig_3, whole genome shotgun sequence;
947689975; NZ_LMGF01000003.1
4570; Sphingomonas sp. Root1294 contig_7, whole genome shotgun
sequence; 947890193; NZ_LMEJ01000014.1
4571; Sphingomonas sp. Root720 contig_7, whole genome shotgun sequence;
947704642; NZ_LMID01000015.1
4572; Sphingomonas sp. Root720 contig_8, whole genome shotgun sequence;
947704650; NZ_LMID01000016.1
4573; Sphingomonas sp. Root710 contig_1, whole genome shotgun sequence;
947721816; NZ_LMIB01000001.1
4574; Mesorhizobium sp. Root172 contig_2, whole genome shotgun sequence;
947919015; NZ_LMHP01000012.1
4575; Mesorhizobium sp. Root102 contig_3, whole genome shotgun sequence;
947937119; NZ_LMCP01000023.1
4576; Paenibacillus sp. Soil750 contig_1, whole genome shotgun sequence;
947966412; NZ_LMSD01000001.1
4577; Paenibacillus sp. Soil750 contig_1, whole genome shotgun sequence;
947966412; NZ_LMSD01000001.1
4578; Paenibacillus sp. Soil522 contig_3, whole genome shotgun sequence;
947983982; NZ_LMRV01000044.1
4579; Paenibacillus sp. Root52 contig_3, whole genome shotgun sequence;
948045460; NZ_LMFO01000023.1
4580; Bacillus sp. Soil768D1 contig_5, whole genome shotgun sequence;
950170460; NZ_LMTA01000046.1
4581; Paenibacillus sp. Soil724D2 contig_11, whole genome shotgun
sequence; 946400391; LMRY01000003.1
4582; Paenibacillus sp. Root444D2 contig_4, whole genome shotgun
sequence; 950271971; NZ_LMEO01000034.1
4583; Paenibacillus sp. Soil766 contig_32, whole genome shotgun sequence;
950280827; NZ_LMSJ01000026.1
4584; Paenibacillus sp. Soil766 contig_32, whole genome shotgun sequence;
950280827; NZ_LMSJ01000026.1
4585; Streptomyces sp. Root1310 contig_5, whole genome shotgun sequence;
951121600; NZ_LMEQ01000031.1
4586; Bacillus muralis strain DSM 16288 Scaffold4, whole genome shotgun
sequence; 951610263; NZ_LMBV01000004.1
4587; Streptomyces sp. MBT76 scaffold_4, whole genome shotgun sequence;
953813790; NZ_LNBE01000004.1
4588; Gorillibacterium sp. SN4, whole genome shotgun sequence; 960412751;
NZ_LN881722.1
4589; Thalassobius activus strain CECT 5114, whole genome shotgun
sequence; 960424655; NZ_CYUE01000025.1
4590; Microbacterium testaceum strain NS283 contig_37, whole genome
shotgun sequence; 969836538; NZ_LDRU01000037.1
4591; Microbacterium testaceum strain NS206 contig_27, whole genome
shotgun sequence; 969912012; NZ_LDRS01000027.1
4592; Microbacterium testaceum strain NS183 contig_65, whole genome
shotgun sequence; 969919061; NZ_LDRR01000065.1
4593; Sphingopyxis sp. H050 H050_contig000006, whole genome shotgun
sequence; 970555001; NZ_LNRZ01000006.1

What is claimed:

1. A fusion protein comprising a bacteriophage coat protein fused to a lasso peptide component.

2. The fusion protein of claim 1, wherein the bacteriophage coat protein comprises p3, p6, p7, p8 or p9 of filamentous phages, small outer capsid (SOC) protein or highly antigenic outer capsid (HOC) protein of a T4 phage, pX of a T7 phage, pD or pV of a λ (lambda) phage or a functional variant thereof.

3. The fusion protein of claim 2, wherein the functional variant is selected from a truncation, deletion, insertion, mutation, conjugation, domain-shuffling or domain-swapping.

4. The fusion protein of claim 1, wherein the lasso peptide component is a lasso precursor peptide, a lasso core peptide, a lasso peptide or a functional fragment of lasso peptide.

5. The fusion protein of claim 4, wherein the lasso precursor peptide comprises a sequence of any one of the even numbers of SEQ ID NOS:1-2630, or a sequence having greater than 30% identity of any one of the even numbers of SEQ ID NOS:1-2630.

6. The fusion protein of claim 1, wherein the fusion protein further comprises a periplasmic secretion signal.

7. The fusion protein of claim 6, wherein the periplasmic secretion signal is a periplasmic space-targeting signal sequence derived from TorA, PelB, OmpA, pi, PhoA, DsbA, TolB, TorT, a substrate of the Type II Secretion System (T2SS), or a functional variant thereof.

8. The fusion protein of claim 1, wherein the bacteriophage coat protein is fused to the lasso peptide component via a first linker.

9. The fusion protein of claim 8, wherein the first linker is a cleavable linker.

10. The fusion protein of any one of claims 1 to 10, wherein the lasso peptide fragment comprises at least one unusual amino acid or unnatural amino acid.

11. A nucleic acid molecule encoding the fusion protein according to any one of claims 1 to 10.

12. The nucleic acid molecule of claim 11, wherein the nucleic acid comprises a sequence of any one of the odd numbers of SEQ ID NOS:1-2630, or a sequence having greater than 30% identity of any one of the odd numbers of SEQ ID NOS:1-2630.

13. The fusion protein of claim 10 or 12, wherein the nucleic acid molecule is a phagemid.

14. The fusion protein of any one of claims 1 to 13, wherein the bacteriophage coat protein is derived from a filamentous bacteriophage, a polyhedral bacteriophage, a tailed bacteriophage, or a pleomorphic bacteriophage.

15. The fusion protein of any one of claims 1 to 15, wherein the bacteriophage coat protein is derived from an M13 phage, T4 phage, T7 phage or λ (lambda) phage.

16. A fusion protein comprising at least one lasso peptide biosynthesis component fused to a secretion signal.

17. The fusion protein of claim 16, wherein the secretion signal is a periplasmic secretion signal.

18. The fusion protein of claim 17, wherein the periplasmic secretion signal is a periplasmic space targeting signal sequence derived from TorA, PelB, OmpA, pIII, PhoA, DsbA, TolB, TorT, a substrate of the Type II Secretion System (T2SS), or a functional variant thereof.

19. The fusion protein of claim 16, wherein the secretion signal is an extracellular secretion signal.

20. The fusion protein of claim 19, wherein the extracellular secretion signal is an extracellular space targeting signal sequence derived from HlyA, a substrate of the Type 1 Secretion System (T1 SS), or a functional variant thereof.

21. The fusion protein of any one of claims 16 to 20, wherein the at least one lasso peptide biosynthesis component is a lasso peptidase, a lasso cyclase or a lasso RiPP Recognition Element (RRE).

22. The fusion protein of claim 21, wherein the lasso peptidase comprises a sequence of any one of peptide Nos: 1316-2336, or a sequence having greater than 30% identity of any one of peptide Nos: 1316-2336.

23. The fusion protein of claim 21 or 22, wherein the lasso cyclase comprises a sequence of any one of peptide Nos: 2337-3761, or a sequence having greater than 30% identity of any one of peptide Nos: 2337-3761.

24. The fusion protein of any one of claim 21 to 23, wherein the lasso RRE comprises a sequence of any one of peptide Nos: 3762-4593, or a sequence having greater than 30% identity of any one of peptide Nos: 3762-4593.

25. The fusion protein of any one of claims 16 to 21, wherein the fusion protein comprises the lasso peptidase and the lasso RRE.

26. The fusion protein of claim 25, wherein the fusion protein comprises a sequence of any one of peptide Nos: 3768, 3770, 3793, 3811, 3818, 3851, 3855, 3887, 4004, 4018, 4045, 4076, 4132, 4150, 4167, 4168, 4225, 4262, 4379, 4414, 4499, 4504, 4507, 4512, 4517, 4518, 4529, 4532, 4542, 4559, 4561, 4562, or a sequence having greater than 30% identity of any one of peptide Nos: 3768, 3770, 3793, 3811, 3818, 3851, 3855, 3887, 4004, 4018, 4045, 4076, 4132, 4150, 4167, 4168, 4225, 4262, 4379, 4414, 4499, 4504, 4507, 4512, 4517, 4518, 4529, 4532, 4542, 4559, 4561, 4562.

27. The fusion protein of any one of claims 16 to 21, wherein the fusion protein comprises the lasso cyclase and the lasso RRE.

28. The fusion protein of claim 27, wherein the fusion protein comprises a sequence selected from peptide Nos: 2504, 3608 or a sequence having greater than 30% identity of any one of peptide Nos: 2504 and 3608.

29. The fusion protein of any one of claims 16 to 21, wherein the fusion protein comprises the lasso peptidase and the lasso cyclase.

30. The fusion protein of claim 29, wherein the fusion protein comprises a sequence having peptide No: 2903 or a sequence having greater than 30% identity thereof.

31. The fusion protein of any one of claims 16 to 21, wherein the fusion protein comprises the lasso peptidase, the lasso cyclase and the lasso RRE.

32. The fusion protein of any one of claims 16 to 21, wherein the fusion protein comprises more than one lasso peptide biosynthesis component fused together via a first cleavable linker.

33. The fusion protein of any one of claims 16 to 32, wherein the lasso peptide biosynthesis component is fused to the secretion signal via a second cleavable linker.

34. A nucleic acid molecule encoding the fusion protein according to any one of claims 16 to 33.

35. The nucleic acid molecule of claim 34, wherein the nucleic acid comprises a sequence encoding any one of peptide Nos. 1316-2336, 2337-3761, and 3762-4593.

36. A system comprising (i) a first nucleic acid sequence encoding one or more structural proteins of a bacteriophage; (ii) a second nucleic acid sequence encoding at least one lasso peptide component; and (iii) a third nucleic acid sequence encoding at least one lasso peptide biosynthesis component.

37. The system according to claim 36, wherein the first nucleic acid sequence is one or more plasmid.

38. The system according to claim 36 or 37, wherein the bacteriophage is an M13 phage, a fd phage or a fl phage.

39. The system according to claim 36, wherein the first nucleic acid sequence encodes one or more of p3, p6, p7, p8 or p9 of filamentous phages, or a functional variant thereof.

40. The system according to any one of 36 to 39, wherein the third nucleic acid sequence encodes one or more fusion protein each comprising at least one lasso peptide biosynthesis component fused to a (a) first secretion signal or (b) purification tag.

41. The system according to claim 40, wherein the at least one lasso peptide biosynthesis component comprises one or more of a lasso peptidase, a lasso cyclase and a lasso RRE.

42. The system according to claim 40, wherein the third nucleic acid sequence encodes a first fusion protein comprising a lasso peptidase and the (a) first secretion signal or (b) purification tag.

43. The system according to claim 42, wherein the third nucleic acid sequence further encodes a second fusion protein comprising a lasso cyclase and the (a) first secretion signal or (b) purification tag.

44. The system according to claim 43, wherein the third nucleic acid sequence further encodes a third fusion protein comprising a lasso RRE and the (a) first secretion signal or (b) purification tag.

45. The system according to claim 40, wherein the third nucleic acid sequence encodes a first fusion protein comprising a lasso peptidase, a lasso cyclase and the (a) first secretion signal or (b) purification tag.

46. The system according to claim 45, wherein the third nucleic acid sequence further encodes a second fusion protein comprising an RRE and the (a) first secretion signal or (b) purification tag.

47. The system according to claim 40, wherein the third nucleic acid sequence encodes a first fusion protein comprising a lasso peptidase, a lasso RRE and the (a) first secretion signal or (b) purification tag.

48. The system according to claim 47, wherein the third nucleic acid sequence further encodes a second fusion protein comprising a lasso cyclase and the (a) first secretion signal or (b) purification tag.

49. The system according to claim 40, wherein the third nucleic acid sequence encodes a first fusion protein comprising a lasso cyclase, a lasso RRE and the (a) first secretion signal or (b) purification tag.

50. The system according to claim 49, wherein the third nucleic acid sequence further encodes a second fusion protein comprising a lasso peptidase and the (a) first secretion signal or (b) purification tag.

51. The system according to claim 40, wherein the third nucleic acid sequence encodes a fusion protein comprising a lasso peptidase, a lasso cyclase, a lasso RRE and the (a) first secretion signal or (b) purification tag.

52. The system according to any one of claims 36 to 51, wherein the first secretion signal is a periplasmic secretion signal.

53. The system according to any one of claims 36 to 52, wherein the first secretion signal is an extracellular secretion signal.

54. The system according to any one of claims 36 to 53, wherein the third nucleic acid sequence is one or more plasmid.

55. The system according to any one of claims 36 to 54, wherein the second nucleic acid sequence encodes a fourth fusion protein comprising a lasso peptide component, a bacteriophage coat protein and a second secretion signal, and wherein the second secretion signal is a periplasmic secretion signal.

56. The system according to any one of claims 36 to 55, wherein the lasso peptide component is a lasso precursor peptide, a lasso core peptide, a lasso peptide or a functional fragment of lasso peptide.

57. The system according to claim 55 or 56, wherein the lasso precursor peptide or the lasso core peptide is fused to the bacteriophage coat protein via a cleavable linker.

58. The system according to any one of claims 55 to 57, wherein the bacteriophage coat protein comprises p3, p6, p8 or p9 of filamentous phages, or a functional variant thereof.

59. The system according to any one of claims 55 to 58, wherein the second nucleic acid sequence is a plasmid or a phagemid.

60. The system according to any one of claims 36 to 59, wherein the second nucleic acid sequence comprises a sequence of (i) any one of the odd numbers of SEQ ID NOS:1-2630, (ii) a sequence having greater than 30% identity of any one of the odd numbers of SEQ ID NOS:1-2630, or (iii) a sequence encoding a polypeptide having greater than 30% identity of any one of the even numbers of SEQ ID NOS:1-2630.

61. The system according to any one of claims 36 to 60, wherein the third nucleic acid sequence comprises a sequence encoding a polypeptide having greater than 30% identify of any one of peptide Nos: 1316-2336, peptide Nos: 2337-3761, and peptide Nos: 3762-4593.

62. The system according to any one of claims 36 to 61, wherein two or more of the first nucleic acid sequence, the second nucleic acid sequence and the third nucleic acid sequence are in the same nucleic acid molecule.

63. The system according to claim 62, wherein the nucleic acid molecule is a phagemid.

64. The system according to any one of claims 36 to 63, wherein the periplasmic secretion signal is a periplasmic space targeting signal sequence derived from TorA, PelB, OmpA, pIII, PhoA, DsbA, TolB, TorT, a substrate of the Type II Secretion System (T2SS), or a functional variant thereof.

65. The system according to any one of claims 36 to 64, wherein the extracellular secretion signal is an extracellular space targeting signal sequence derived from HlyA or a substrate of the Type 1 Secretion System (T1SS), or a functional variant thereof.

66. The system according to any one of claims 36 to 65, wherein the purification tag is Albumin-binding protein (ABP), Alkaline Phosphatase (AP), AU1 epitope, AU5 epitope, Bacteriophage T7 epitope (T7 tag), Bacteriophage V5 epitope (V5 tag), Biotin-carboxy carrier protein (BCCP), Bluetongue virus tag (B tag), Calmodulin binding peptide (CBP), Chloramphenicol Acetyl Transferase (CAT), Cellulose binding domain (CBD), Chitin binding domain (CBD), Choline-binding domain (CBD), Dihydrofolate reductase (DHFR), E2 epitope, FLAG epitope, Galactose-binding protein (GBP), Green fluorescent protein (GFP), Glu-Glu (EE-tag), Glutathione-S transferase (GST), Human influenza hemagglutinin (HA), HaloTag®, Histidine affinity tag (HAT), Horseradish peroxidase (HRP), HSV epitope, Ketosteroid isomerase (KSI), KT3 epitope, LacZ, Luciferase, Maltose-binding protein (MBP), Myc epitope, NusA, PDZ ligand, Polyarginine (Arg-tag), Polyaspartate (Asp-tag), Polycysteine (Cys-tag), Polyhistidine (His-tag), Polyphenylalanine (Poly-tag), Profinity eXact™, Protein C, S1-tag, S-tag, Streptavidin-binding peptide (SBP), Staphylococcal protein A (Protein A), Staphylococcal protein G (Protein G), Strep-tag, Streptavidin, Small Ubiquitin-like Modifier (SUMO), Tandem Affinity Purification (TAP), T7 epitope, Thioredoxin (Trx), TrpE, Ubiquitin, Universal, VSV-G.

67. The system according to any one of claims 36 to 66, further comprising a bacterial cell having an intracellular space, wherein the first and second nucleic acid sequences are in the intracellular space of the bacterial cell.

68. The system according to claim 67, wherein the third nucleic acid sequence is in the intracellular space of the bacterial cell.

69. The system according to claim 68, wherein the bacterial cell further comprises a periplasmic space, and wherein the at least one lasso peptide biosynthesis component encoded by the third nucleic acid sequence is in the periplasmic space or the extracellular space.

70. The system according to claim 67, wherein the third nucleic acid sequence is not in the intracellular space of the bacterial cell.

71. The system according to any one of claims 67 to 70, wherein the bacterial cell is a cell of E. coli.

72. The system according to any one of claims 67-71, wherein the lasso peptide fragment comprises at least one unusual amino acid or unnatural amino acid.

73. A non-naturally existing bacteriophage comprising a first coat protein and a phagemid, wherein the first coat protein is fused to a lasso peptide component, and wherein the phagemid encodes at least a portion of the lasso peptide component.

74. The non-naturally existing bacteriophage of claim 73, wherein the phagemid encodes a fusion protein comprising the first coat protein and the lasso peptide component.

75. The non-naturally existing bacteriophage of claim 74, wherein the fusion protein further comprises a periplasmic secretion signal.

76. The non-naturally existing bacteriophage of claim 74, wherein the fusion protein further comprises a cleavable linker.

77. The non-naturally existing bacteriophage of claim 73, wherein the first coat protein is p3, p6, p7, p8 or p9 of filamentous phages or a functional variant thereof.

78. The non-naturally existing bacteriophage of claim 73, wherein the phagemid further encodes at least one lasso peptide biosynthesis component.

79. The non-naturally existing bacteriophage of claim 78, wherein the phagemid encodes a fusion protein comprising the lasso peptide biosynthesis component and a secretion signal.

80. The non-naturally existing bacteriophage of claim 79, wherein the secretion signal is a periplasmic secretion signal or an extracellular secretion signal.

81. The non-naturally existing bacteriophage of claim 73, wherein the phagemid comprises a nucleic acid sequence of (i) any one of the odd numbers of SEQ ID NOS:1-2630, (ii) a sequence having greater than 30% identity of any one of the odd numbers of SEQ ID NOS:1-2630, or (iii) a sequence encoding a polypeptide having greater than 30% identify of any one of the even numbers of SEQ ID NOS:1-2630, peptide Nos: 1316-2336, peptide Nos: 2337-3761, and peptide Nos: 3762-4593.

82. The non-naturally existing bacteriophage of claim 73, wherein the phagemid further encodes at least one structural protein.

83. The non-naturally existing bacteriophage of claim 82, wherein the at least one structural protein comprises p3, p6, p7, p8 or p9 of filamentous phages or a functional variant thereof.

84. The non-naturally existing bacteriophage of claim 83, wherein the phage is an M13 phage.

85. The non-naturally existing bacteriophage of any one of claims 73 to 84, wherein the bacteriophage is in a culture medium of bacteria.

86. The non-naturally existing bacteriophage of claim 85, wherein the culture medium further comprises a bacterial host of the bacteriophage.

87. The non-naturally existing bacteriophage of claim 86, wherein the culture medium further comprises at least one lasso peptide biosynthesis component secreted by the bacterial host.

88. The non-naturally existing bacteriophage of claim 86 or 87, wherein the bacterial host is E. coli.

89. The non-naturally existing bacteriophage of any one of claims 73 to 84, wherein the bacteriophage is purified.

90. The non-naturally existing bacteriophage of any one of claim 89, wherein the bacteriophage is in contact with at least one lasso peptide biosynthesis component.

91. The non-naturally existing bacteriophage of claim 18, wherein the at least one lasso peptide biosynthesis component is recombinantly produced or purified.

92. The non-naturally existing bacteriophage of any one of claims 87 to 91, wherein the lasso peptide component is a lasso precursor peptide and the at least one lasso biosynthesis component comprises a lasso peptidase and a lasso cyclase.

93. The non-naturally existing bacteriophage of any one of claims 87 to 91, wherein the lasso peptide component is a lasso core peptide and the at least one lasso biosynthesis component comprises a lasso cyclase.

94. The non-naturally existing bacteriophage of claim 92 or 93, wherein the lasso biosynthesis component further comprises a lasso RRE.

95. The non-naturally existing bacteriophage of claim 94, wherein two or more of the lasso peptidase, lasso cyclase and lasso RRE are fused together.

96. The non-naturally existing bacteriophage of any one of claims 73 to 96, wherein the lasso peptide component is a lasso peptide or a functional fragment of lasso peptide.

97. The non-naturally existing bacteriophage of any one of claims 73 to 97, wherein the lasso peptide component comprises at least one unusual or unnatural amino acid.

98. The non-naturally existing bacteriophage of any one of claims 73 to 98, wherein the bacteriophage is a filamentous bacteriophage, a polyhedral bacteriophage, a tailed bacteriophage, or a pleomorphic bacteriophage.

99. A composition comprising at least two non-naturally existing bacteriophages according to any one of claims 73 to 96.

100. The composition according to claim 99, wherein the lasso peptide components of the at least two non-naturally existing bacteriophages are the same.

101. The composition according to claim 99, wherein each of the lasso peptide components of the at least two non-naturally existing bacteriophages is unique.

102. A bacteriophage display library comprising the composition of any one of claims 99 to 101.

103. A bacterial cell comprising the system according to any one of claims 36 to 66 or the non-naturally existing bacteriophage according to any one of claims 73 to 96.

104. The bacterial cell according to claim 103, wherein the bacterial cell is a cell of E. coli.

105. The bacterial cell according to claim 103 or 104, wherein the bacterial cell is a cell of genetically engineered E. coli.

106. The bacterial cell according to claim 105, wherein the genetically engineered E. coli cell comprises a nucleic acid sequence encoding a modified aminoacyl-tRNA synthetase (aaRS) capable of recognizing an unusual or unnatural amino acid residue.

107. The bacterial cell according to claim 106 further comprises a complementary tRNA that is aminoacylated by the modified aminoacyl-tRNA synthetase (aaRS).

108. A cultural medium comprising the bacterial cell according to claim 103 to 107.

109. The culture medium of claim 108, wherein the culture medium comprises natural, non-natural or unusual amino acid residues.

110. The non-naturally existing bacteriophage according to any one of claims 73 to 96, or the composition according to any one of claims 99 to 101, or the bacteriophage display library of claim 102, or the bacterial cell according to claim 103 to 107, or the cultural medium according to claim 108 or 109, in contact with a target molecule that is capable of binding to the lasso peptide component.

111. The non-naturally existing bacteriophage according to any one of claims 73 to 96, or the composition according to any one of claims 99 to 101, or the bacteriophage display library of claim 102, or the bacterial cell according to claim 103 to 107, or the cultural medium according to claim 108 or 109, wherein the target molecule is a cell surface protein or a secreted protein.

112. The non-naturally existing bacteriophage according to claim 111, wherein the cell surface protein comprises a transmembrane domain.

113. The non-naturally existing bacteriophage according to claim 111, wherein the cell surface protein does not comprise a transmembrane domain.

114. The non-naturally existing bacteriophage according to any one of claims 73 to 96, or the composition according to any one of claims 99 to 101, or the bacteriophage display library of claim 102, or the bacterial cell according to claim 103 to 107, or the cultural medium according to claim 108 or 109, wherein the target molecule is capable of modulating a cellular activity in a cell expressing the target molecule.

115. A method for making a member of a bacteriophage display library comprising
providing a system comprising (i) a first nucleic acid sequence encoding one or more structural proteins of a bacteriophage; (ii) a phagemid comprising a second nucleic acid sequence encoding a lasso peptide component fused to a bacteriophage coat protein; and (iii) a third nucleic acid sequence encoding at least one lasso peptide biosynthesis component;
introducing the system into a population of bacterial cells;
culturing the population of bacterial cells under a suitable condition to produce a plurality of bacteriophages each displaying the lasso peptide component on the coat protein; and
wherein the lasso peptide biosynthesis component processes the lasso peptide component into a lasso peptide or a functional fragment of lasso peptide.

116. The method of claim 115, wherein the bacterial cell comprises a periplasmic space, and wherein the lasso peptide component is fused to a first periplasmic secretion signal.

117. The method of claim 116, wherein the lasso peptide biosynthesis component is fused to a second periplasmic secretion signal; and wherein the lasso peptide biosynthesis component processes the lasso peptide component into the lasso peptide or functional fragment of lasso peptide in the periplasmic space.

118. The method of claim 116, wherein the lasso peptide biosynthesis component is fused to an extracellular secretion signal; and wherein the lasso peptide biosynthesis component processes the lasso peptide component into the lasso peptide or functional fragment of lasso peptide in the extracellular space.

119. A method for making a member of bacteriophage display library comprising
providing a system comprising (i) a first nucleic acid sequence encoding one or more structural proteins of a bacteriophage; and (ii) a phagemid comprising a second nucleic acid sequence encoding a lasso peptide component fused to a bacteriophage coat protein;
introducing the system into a population of bacterial cells; and
culturing the population of bacterial cells under a first suitable condition to produce a plurality of bacteriophages each displaying the lasso peptide component on the coat protein;
contacting the plurality of bacteriophages with at least one purified lasso peptide biosynthesis component under a second suitable condition to allow the lasso peptide biosynthesis component to process the lasso peptide component into a lasso peptide or functional fragment of lasso peptide.

120. The method of 119, wherein the plurality of bacteriophages are purified before the step of contacting.

121. The method of 119, wherein the contacting is performed by adding a purified lasso peptide biosynthesis component into a culture medium containing the bacteriophages.

122. The method of any one of claims 115 to 121, wherein the population of bacterial cells are cells of E. coli of one of claims 103 to 107.

123. The method of any one of claims 115 to 122, wherein the lasso peptide components of the plurality of bacteriophages are the same.

124. The method of any one of claims 115 to 122, wherein each of the lasso peptide components of the plurality of bacteriophages is unique.

125. The method of any one of claims 115 to 124, wherein the system is the system of any one of claims 36 to 71.

126. A method for evolving a lasso peptide of interest for a target property, comprising
a. providing a first bacteriophage display library comprising members derived from the lasso peptide of interest, wherein each member of the first lasso peptide display library comprises at least one mutation to the lasso peptide of interest;
b. subjecting the library to a first assay under a first condition to identify members having the target property;
c. identifying the mutations of the identified members as beneficial mutations; and
d. introducing the beneficial mutations into the lasso peptide of interest to provide an evolved lasso peptide.

127. The method of claim 126, wherein the method further comprises:
f. providing an evolved bacteriophage display library of lasso peptides comprising members derived from the evolved lasso peptide, wherein the members of the evolved bacteriophage display library retain at least one beneficial mutation;
g. repeating steps b through d.

128. The method of claim 127, wherein the method further comprises repeating steps f and g for at least one more round.

129. The method of any one of claims 126 to 128, wherein the evolved bacteriophage display library is subjected to the first assay under a second condition more stringent for the target property than the first condition.

130. The method of any one of claims 127 to 129, wherein the evolved bacteriophage display library is subjected to a second assay to identify members having the target property.

131. The method of any one of claims 126 to 130, wherein the method further comprises validating the evolved lasso peptide using at least one additional assay different from the first or second assay.

132. The method of any one of claims 126 to 131, wherein the target property comprises binding affinity for a target molecule.

133. The method of any one of claims 126 to 131, wherein the target property comprises binding specificity for a target molecule.

134. The method of any one of claims 126 to 131, wherein the target property comprises capability of modulating a cellular activity or cell phenotype.

135. The method of claim 134, wherein the modulation is antagonist modulation or agonist modulation.

136. The method of any one of claims 126 to 135, wherein the mutation comprises substituting at least one amino acid with an unusual or unnatural amino acid.

137. The method of any one of claims 126 to 136, wherein the target property is at least two target properties screened simultaneously.

138. A method for identifying a lasso peptide that specifically binds to a target molecule, the method comprising:
providing a bacteriophage display library comprising a plurality of members, each member comprising a lasso peptide or a functional fragment of lasso peptide;
contacting the library with the target molecule under a suitable condition that allows at least one member of the library to form a complex with the target molecule; and
identifying the member of in the complex.

139. The method of claim 138,
wherein the contacting is performed by contacting the library with the target molecule in the presence of a reference binding partner of the target molecule under a suitable condition that allows at least one member of the library to compete with the reference binding partner for binding to the target molecule; and
wherein the identifying step is performed by detecting reduced binding of the reference binding partner to the target molecule; and identifying the member responsible for the reduced binding.

140. The method of claim 139, wherein the reference binding partner is a ligand for the target molecule.

141. The method of claim 139 or 140, wherein the target molecule comprises one or more target sites, and the reference binding partner specifically binds to a target site of the target molecule.

142. The method of claim 140, wherein the reference binding partner is a natural ligand or synthetic ligand for the target molecule.

143. The method of any one of methods 138 to 142, wherein the target molecule is at least two target molecules.

144. A method for identifying a lasso peptide that modulates a cellular activity, the method comprising
a. providing a bacteriophage display library comprising a plurality of members, each member comprising a lasso peptide or a functional fragment of lasso peptide;
b. subjecting the library to a suitable biological assay configured for measuring the cellular activity;
c. detecting a change in the cellular activity; and
d. identifying the members responsible for the detected change.

145. The method of claim 144, wherein the step b is performed by subjecting the library to multiple biological assays configured for measuring the cellular activity; and the method further comprises selecting the members that have a high probability of being identified as responsible for the detected change in the cellular activity.

146. A method for identifying an agonist or antagonist lasso peptide for a target molecule, the method comprising:
providing a bacteriophage display library comprising a plurality of members, each member comprising a lasso peptide or a functional fragment of lasso peptide;
contacting the library with a cell expressing the target molecule under a suitable condition that allows at least one member of the library to bind to the target molecule;
measuring a cellular activity mediated by the target molecule; and
identifying the member as an agonist ligand for the target molecule if said cellular activity is increased; or identifying the member as an antagonist ligand if said cellular activity is decreased.

147. A nucleic acid molecule comprising a first sequence encoding one or more structural proteins of a bacteriophage and a second sequence encoding a first fusion protein comprising a lasso peptide component fused to a first coat protein of the bacteriophage.

148. The nucleic acid molecule of claim 147, wherein the second sequence further encodes a second fusion protein comprising an identification peptide fused to a second coat protein of the bacteriophage.

149. The nucleic acid molecule of claim 147 or 148, wherein the nucleic acid molecule is a mutated genome of the bacteriophage, wherein one or more endogenous sequence encoding the first and/or second coat protein(s) is deleted from the genome.

150. The nucleic acid molecule of any one of claims 147 to 149, wherein at least one of the first and second coat proteins is a nonessential outer capsid protein of the bacteriophage.

151. The nucleic acid molecule of claim 150, wherein the second sequence is an exogenous sequence.

152. The nucleic acid molecule of any one of claims 147 to 151, wherein the bacteriophage is a non-naturally occurring T4 phage, T7 phage or λ (lambda) phage.

153. The nucleic acid molecule of claim 152, wherein the nucleic acid molecule is a mutated genome of the T4 phage with endogenous sequences coding for HOC and/or SOC deleted.

154. The nucleic acid molecule of claim, wherein the second sequence encodes a fusion protein comprising the lasso peptide component fused to HOC.

155. The nucleic acid molecule of claim 154, wherein the second sequence encodes a fusion protein comprising the identification peptide fused to SOC.

156. The nucleic acid molecule according to any one of claims 147 to 155, wherein the lasso peptide component is a lasso precursor peptide, a lasso core peptide, a lasso peptide or a functional fragment of lasso peptide.

157. The nucleic acid molecule according to claim 156, wherein the lasso precursor peptide comprises a sequence of any one of the even numbers of SEQ ID NOS:1-2630, or a sequence having greater than 30% identity of any one of the even numbers of SEQ ID NOS:1-2630.

158. The nucleic acid molecule according to any one of claims 147 to 157, wherein the nucleic acid comprises a sequence of any one of the odd numbers of SEQ ID NOS:1-2630, or a sequence having greater than 30% identity of any one of the odd numbers of SEQ ID NOS:1-2630.

159. The nucleic acid molecule according to any one of claim 148 to 158, wherein the identification peptide is a purification tag.

160. The nucleic acid molecule according to claim 159, wherein the purification tag is Albumin-binding protein (ABP), Alkaline Phosphatase (AP), AU1 epitope, AU5 epitope, Bacteriophage T7 epitope (T7 tag), Bacteriophage V5 epitope (V5 tag), Biotin-carboxy carrier protein (BCCP), Bluetongue virus tag (B tag), Calmodulin binding peptide (CBP), Chloramphenicol Acetyl Transferase (CAT), Cellulose binding domain (CBD), Chitin binding domain (CBD), Choline-binding domain (CBD), Dihydrofolate reductase (DHFR), E2 epitope, FLAG epitope, Galactose-binding protein (GBP), Green fluorescent protein (GFP), Glu-Glu (EE-tag), Glutathione-S transferase (GST), Human influenza hemagglutinin (HA), HaloTag®, Histidine affinity tag (HAT), Horseradish peroxidase (HRP), HSV epitope, Ketosteroid isomerase (KSI), KT3 epitope, LacZ, Luciferase, Maltose-binding protein (MBP), Myc epitope, NusA, PDZ ligand, Polyarginine (Arg-tag), Polyaspartate (Asp-tag), Polycysteine (Cys-tag), Polyhistidine (His-tag), Polyphenylalanine (Poly-tag), Profinity eXact™, Protein C, S1-tag, S-tag, Streptavidin-binding peptide (SBP), Staphylococcal protein A (Protein A), Staphylococcal protein G (Protein G), Strep-tag, Streptavidin, Small Ubiquitin-like Modifier (SUMO), Tandem Affinity Purification (TAP), T7 epitope, Thioredoxin (Trx), TrpE, Ubiquitin, Universal, VSV-G.

161. The nucleic acid molecule according to any one of claim 147 to 160, wherein the first fusion protein further comprises a linker between the first protein and the lasso peptide component.

162. The nucleic acid molecule according to claim 161, wherein the linker is a cleavable linker.

163. A system comprising (i) a first nucleic acid sequence encoding one or more structural proteins of a bacteriophage; (ii) a second nucleic acid sequence encoding a first fusion protein comprising a lasso peptide component fused to a first coat protein of the bacteriophage; and (iii) a third nucleic acid sequence encoding at least one lasso peptide biosynthesis component.

164. The system according to 163, wherein the second nucleic acid sequence further encodes a second fusion protein comprising an identification peptide fused to a second coat protein of the bacteriophage.

165. The system according to claim 163 or 164, wherein the first nucleic acid sequence does not encode the first and/or second nonessential outer capsid protein(s) of the bacteriophage.

166. The system according to claim 165, wherein the first nucleic acid sequence is a mutated genome of the bacteriophage.

167. The system according to claim 163 or 164, wherein the first nucleic acid sequence encodes the first and/or second coat protein(s) of the bacteriophage.

168. The system according to claim 167, wherein the first nucleic acid sequence is a wild-type genome of the bacteriophage.

169. The system according to any one of claims 163 to 168, wherein at least one of the first and second coat proteins is a nonessential outer capsid protein of the bacteriophage.

170. The system according to any one of claims 163 to 168, wherein the bacteriophage is a non-naturally occurring T4 phage, T7 phage, or λ (lambda) phage.

171. The system according to any one of claims 163 to 170, wherein the first nucleic acid sequence and the second nucleic acid sequence are in separate nucleic acid molecules.

172. The system according to claim 171, further comprising a site-specific recombinase capable of catalyzing homologous recombination between the first and second nucleic acid sequences to produce a recombinant sequence; wherein the recombinant sequence encodes for the one or more structural proteins of the bacteriophage and the first and/or second fusion protein.

173. The system according to claim 171 or 172, wherein the mutated phage genome is T4 phage genome devoid of one or more sequence coding for the first and/or second nonessential outer capsid protein(s).

174. The system according to any one of claims 171 to 173, wherein the second nucleic acid sequence is a plasmid.

175. The system according to any one of claims 163 to 170, wherein the first nucleic acid sequence and the second nucleic acid sequence are in the same nucleic acid molecule.

176. The system according to claim 175, wherein the nucleic acid molecule is a mutated genome of the bacteriophage devoid of one or more endogenous sequence encoding the first and/or second nonessential outer capsid protein(s).

177. The system according to claim 176, wherein the second sequence is an exogenous sequence.

178. The system according to any one of claims 175 to 177, wherein the nucleic acid molecule is a mutated genome of the T4 phage with endogenous sequences coding for HOC and/or SOC deleted.

179. The system according to claim 178, wherein the second sequence encodes a fusion protein comprising the lasso peptide component fused to HOC.

180. The system according to claim 179, wherein the second sequence encodes a fusion protein comprising the identification peptide fused to SOC.

181. The system according to any one of claims 163 to 180, wherein the lasso peptide component is a lasso precursor peptide, a lasso core peptide, a lasso peptide or a functional fragment of lasso peptide.

182. The system according to claim 181, wherein the lasso precursor peptide comprises a sequence of any one of the even numbers of SEQ ID NOS:1-2630, or a sequence having greater than 30% identity of any one of the even numbers of SEQ ID NOS:1-2630.

183. The system according to any one of claims 163 to 182, wherein the nucleic acid comprises (i) a sequence of any one of the odd numbers of SEQ ID NOS:1-2630, (ii) a sequence having greater than 30% identity of any one of the odd numbers of SEQ ID NOS:1-2630, or (iii) a sequence encoding a polypeptide having greater than 30% identity of any one of the even numbers of SEQ ID NOS:1-2630.

184. The system according to any one of claims 163 to 183, wherein the third nucleic acid sequence encodes one or more lasso peptide biosynthesis component.

185. The system according to claim 184, wherein the at least one lasso peptide biosynthesis component comprises one or more of a lasso peptidase, a lasso cyclase and a lasso RRE.

186. The system according to claim 185, wherein the third nucleic acid sequence encodes a lasso peptidase.

187. The system according to claim 186, wherein the third nucleic acid sequence further encodes a lasso cyclase.

188. The system according to claim 187, wherein the third nucleic acid sequence further encodes a lasso RRE.

189. The system according to claim 185, wherein the third nucleic acid sequence encodes a fusion protein comprising a lasso peptidase and a lasso cyclase.

190. The system according to claim 189, wherein the third nucleic acid sequence further encodes a lasso RRE.

191. The system according to claim 185, wherein the third nucleic acid sequence encodes a fusion protein comprising a lasso peptidase and a lasso RRE.

192. The system according to claim 190, wherein the third nucleic acid sequence further encodes a lasso cyclase.

193. The system according to claim 185, wherein the third nucleic acid sequence encodes a fusion protein comprising a lasso cyclase and a lasso RRE.

194. The system according to claim 193, wherein the third nucleic acid sequence further encodes a lasso peptidase.

195. The system according to claim 185, wherein the third nucleic acid sequence encodes a fusion protein comprising a lasso peptidase, a lasso cyclase, and a lasso RRE.

196. The system according to any one of claims 163 to 195, wherein the third nucleic acid sequence comprises a sequence encoding a polypeptide having greater than 30% identify of any one of peptide Nos: 1316-2336, peptide Nos: 2337-3761, and peptide Nos: 3762-4593.

197. The system according to any one of claims 163 to 196, wherein the third nucleic acid sequence is one or more plasmid.

198. The system according to any one of claims 163 to 197, further comprising a microbial cell having cytoplasm, wherein the first, second and third nucleic acid sequences are in the cytoplasm of the microbial cell.

199. The system according to any one of claims 163 to 198, wherein the microbial cell is a bacterial cell or an archaea cell.

200. The system according to claim 199, wherein the bacterial cell is E. coli.

201. The system according to any one of claims 163 to 200, further comprising a cell-free biosynthesis reaction mixture, wherein the first, second and third nucleic acid sequence are in the cell-free biosynthesis reaction mixture.

202. The system according to any one of claim 163 to 201, wherein the identification peptide is a purification tag.

203. The nucleic acid molecule according to claim 202, wherein the purification tag is Albumin-binding protein (ABP), Alkaline Phosphatase (AP), AU1 epitope, AU5 epitope, Bacteriophage T7 epitope (T7 tag), Bacteriophage V5 epitope (V5 tag), Biotin-carboxy carrier protein (BCCP), Bluetongue virus tag (B tag), Calmodulin binding peptide (CBP), Chloramphenicol Acetyl Transferase (CAT), Cellulose binding domain (CBD), Chitin binding domain (CBD), Choline-binding domain (CBD), Dihydrofolate reductase (DHFR), E2 epitope, FLAG epitope, Galactose-binding protein (GBP), Green fluorescent protein (GFP), Glu-Glu (EE-tag), Glutathione-S transferase (GST), Human influenza hemagglutinin (HA), HaloTag®, Histidine affinity tag (HAT), Horseradish peroxidase (HRP), HSV epitope, Ketosteroid isomerase (KSI), KT3 epitope, LacZ, Luciferase, Maltose-binding protein (MBP), Myc epitope, NusA, PDZ ligand, Polyarginine (Arg-tag), Polyaspartate (Asp-tag), Polycysteine (Cys-tag), Polyhistidine (His-tag), Polyphenylalanine (Poly-tag), Profinity eXact™, Protein C, S1-tag, S-tag, Streptavidin-binding peptide (SBP), Staphylococcal protein A (Protein A), Staphylococcal protein G (Protein G), Strep-tag, Streptavidin, Small Ubiquitin-like Modifier (SUMO), Tandem Affinity Purification (TAP), T7 epitope, Thioredoxin (Trx), TrpE, Ubiquitin, Universal, VSV-G.

204. The system according to any one of claim 163 to 203, wherein the first fusion protein further comprises a linker between the first protein and the lasso peptide component.

205. The system according to 204, wherein the liner is a cleavable linker.

206. A system comprising a bacteriophage devoid of a first nonessential outer capsid protein, and a first fusion protein comprising a lasso peptide component fused to the first nonessential outer capsid protein of the bacteriophage.

207. The system according to claim 206, wherein the bacteriophage is devoid of a second nonessential outer capsid protein, and wherein the system further comprises a second fusion protein comprising an identification peptide fused to the second nonessential outer capsid protein of the bacteriophage.

208. The system according to claim 206 or 207, wherein the bacteriophage comprises a mutated genome having one or more endogenous sequence encoding the first and/or second nonessential outer capsid protein(s) of the bacteriophage deleted.

209. The system according to claim 208, wherein the mutated genome further comprising an exogenous sequence encoding the first and/or second fusion protein.

210. The system according to any one of claims 206 to 209, wherein the bacteriophage is a non-naturally occurring T4 phage, T7 phage or λ (lambda) phage.

211. The system according to any one of claims 206 to 210, wherein the bacteriophage is a non-naturally occurring T4 phage, and wherein the first nonessential outer capsid protein is HOC and the second nonessential outer capsid protein is SOC.

212. The system according to any one of claims 206 to 211, wherein the lasso peptide component is a lasso precursor peptide, a lasso core peptide, a lasso peptide or a functional fragment of lasso peptide.

213. The system according to claim 212, further comprises at least one lasso peptide biosynthesis component.

214. The system according to any one of claims 206 to 213, wherein the bacteriophage, the first and/or second fusion protein(s), and/or the at least one lasso peptide biosynthesis component is in a cytoplasm of the host microbial cell.

215. The system according to any one of claims 206 to 213, wherein the bacteriophage, the first and/or second fusion protein(s), and/or the at least one lasso peptide biosynthesis component is in a cell-free biosynthesis reaction mixture.

216. The system according to any one of claims 206 to 213, wherein the bacteriophage, the first and/or second fusion protein(s), and/or the at least one lasso peptide biosynthesis component is purified.

217. The system according to any one of claims 206 to 216 further comprising a solid support having at least one unique location, wherein the bacteriophage, the first and/or second fusion protein(s), and/or the at least one lasso peptide biosynthesis component is located at the unique location.

218. The system according to claim 217, wherein the lasso precursor peptide comprises a sequence of any one of the even numbers of SEQ ID NOS:1-2630, or a sequence having greater than 30% identity of any one of the even numbers of SEQ ID NOS:1-2630.

219. The system according to any one of claims 213 to 218, wherein the at least one lasso peptide biosynthesis component comprises one or more of a lasso peptidase, a lasso cyclase and a lasso RRE.

220. The system according to claim 219, wherein the lasso peptidase comprises a sequence of any one of peptide Nos: 1316-2336, or a sequence having greater than 30% identity of any one of peptide Nos: 1316-2336.

221. The system according to claim 219, wherein the lasso cyclase comprises a sequence of any one of peptide Nos: 2337-3761, or a sequence having greater than 30% identity of any one of peptide Nos: 2337-3761.

222. The system according to claim 219, wherein the lasso RRE comprises a sequence of any one of peptide Nos: 3762-4593, or a sequence having greater than 30% identity of any one of peptide Nos: 3762-4593.

223. The system according to any one of claims 213 to 218, wherein the at least one lasso peptide biosynthesis component comprises a fusion protein comprising a lasso peptidase and a lasso cyclase.

224. The system according to any one of claims 213 to 218, wherein the at least one lasso peptide biosynthesis component comprises a fusion protein comprising a lasso peptidase and a lasso RRE.

225. The system according to claim 224, wherein the fusion protein comprising the lasso peptidase and the lasso RRE comprises a sequence of any one of peptide Nos: 3768, 3770, 3793, 3811, 3818, 3851, 3855, 3887, 4004, 4018, 4045, 4076, 4132, 4150, 4167, 4168, 4225, 4262, 4379, 4414, 4499, 4504, 4507, 4512, 4517, 4518, 4529, 4532, 4542, 4559, 4561, 4562, or a sequence having greater than 30% identity of any one of peptide Nos: 3768, 3770, 3793, 3811, 3818, 3851, 3855, 3887, 4004, 4018, 4045, 4076, 4132, 4150, 4167, 4168, 4225, 4262, 4379, 4414, 4499, 4504, 4507, 4512, 4517, 4518, 4529, 4532, 4542, 4559, 4561, 4562.

226. The system according to any one of claims 213 to 218, wherein the at least one lasso peptide biosynthesis component comprises a fusion protein comprising a lasso cyclase and a lasso RRE.

227. The system according to claim 226, wherein the fusion protein comprising the lasso cyclase and the lasso RRE comprises a sequence selected from peptide Nos: 2504, 3608 or a sequence having greater than 30% identity of any one of peptide Nos: 2504 and 3608.

228. The system according to any one of claims 213 to 218, wherein the at least one lasso peptide biosynthesis component comprises a fusion protein comprising a lasso peptidase and a lasso cyclase.

229. The system according to claim 228, wherein the fusion protein comprising the lasso peptidase and the lasso cyclase comprises a sequence having peptide No: 2903 or a sequence having greater than 30% identity thereof.

230. The system according to any one of claims 213 to 218, wherein the at least one lasso peptide biosynthesis component comprises a fusion protein comprising a lasso peptidase, a lasso cyclase, and a lasso RRE.

231. The system according to claim 214, wherein the host microbial cell is a bacterial cell or an archaeal cell.

232. The system according to claim 231, wherein the host microbial cell is E. coli.

233. The system according to any one of claims 207 to 232, wherein the identification peptide is a purification tag.

234. The system according to any one of claims 206 to 233, wherein the system further comprises a solid support having at least one unique location.

235. The system according to claim 233, wherein the purification tag is Albumin-binding protein (ABP), Alkaline Phosphatase (AP), AU1 epitope, AU5 epitope, Bacteriophage 17 epitope (T7 tag), Bacteriophage V5 epitope (V5-tag), Biotin-carboxy carrier protein (BCCP), Bluetongue virus tag (B tag), Calmodulin binding peptide (CBP), Chloramphenicol Acetyl Transferase (CAT), Cellulose binding domain (CBD), Chitin binding domain (CBD), Choline-binding domain (CBD), Dihydrofolate reductase (DHFR), E2 epitope, FLAG epitope, Galactose-binding protein (GBP), Green fluorescent protein (GFP), Glu-Glu (EE-tag), Glutathione-S transferase (GST), Human influenza hemagglutinin (HA), HaloTag®, Histidine affinity tag (HAT), Horseradish peroxidase (HRP), HSV epitope, Ketosteroid isomerase (KSI), KT3 epitope, LacZ, Luciferase, Maltose-binding protein (MBP), Myc epitope, NusA, PDZ ligand, Polyarginine (Arg-tag), Polyaspartate (Asp-tag), Polycysteine (Cys-tag), Polyhistidine (His-tag), Polyphenylalanine (Poly-tag), Profinity eXact™, Protein C, S1-tag, S-tag, Streptavidin-binding peptide (SBP), Staphylococcal protein A (Protein A), Staphylococcal protein G (Protein G), Strep-tag, Streptavidin, Small Ubiquitin-like Modifier (SUMO), Tandem Affinity Purification (TAP), T7 epitope, Thioredoxin (Trx), TrpE, Ubiquitin, Universal, VSV-G.

236. The system according to any one of claim 206 to 235, wherein the first fusion protein further comprises a linker between the first protein and the lasso peptide component.

237. The system according to 236, wherein the liner is a cleavable linker.

238. A bacteriophage comprising a genome and a capsid, wherein the capsid comprises a plurality of a first coat proteins, and wherein at least one of the first coat proteins is fused to a lasso peptide component in a first fusion protein.

239. The bacteriophage according to claim 238, further comprises a plurality of a second coat protein, and wherein at least one of the second coat protein is fused to an identification peptide in a second fusion protein.

240. The bacteriophage according to claim 238 or 239, wherein the genome is devoid of one or more endogenous sequence encoding the first and/or second coat protein(s).

241. The bacteriophage according to claim 240, wherein the genome further comprises an exogenous sequence encoding the first and/or second fusion protein.

242. The bacteriophage according to claim 236 or 239, wherein the genome is a wild-type genome.

243. The bacteriophage according to any one of claims 238 to 242, wherein at least one first coat protein is wild-type.

244. The bacteriophage according to any one of claims 238 to 243, wherein at least one second coat protein is wild-type.

245. The bacteriophage according to claim 238, wherein the genome is wild-type, and wherein the capsid comprises at least one first coat protein in the first fusion protein, and at least one first coat protein that is wild-type.

246. The bacteriophage according to claim 245, wherein the capsid further comprises at least one second coat protein in the second fusion protein, and at least one second coat protein that is wild-type.

247. The bacteriophage according to claim 238, wherein the genome is devoid of an endogenous sequence coding for the first coat protein, and wherein the capsid comprises at least one first coat protein in the first fusion protein.

248. The bacteriophage according to claim 247, wherein the genome further comprises an exogenous sequence encoding the first fusion protein.

249. The bacteriophage according to claim 248, wherein the capsid further comprises at least one first coat protein that is wild-type.

250. The bacteriophage according to any one of claims 247 to 249, wherein the genome is further devoid of an endogenous sequence coding for the second coat protein, and wherein the capsid comprises at least one second coat protein in the second fusion protein.

251. The bacteriophage according to claim 250, wherein the capsid further comprises at least one second coat protein that is wild-type.

252. The bacteriophage according to any one of claims 238 to 251, wherein the first coat protein is a nonessential outer capsid protein.

253. The bacteriophage according to claim 252, wherein the second coat protein is a nonessential outer capsid protein.

254. The bacteriophage according to any one of claims 238 to 253, wherein the bacteriophage is a non-naturally occurring T4 phage, T7 phage or a λ (lambda) phage.

255. The bacteriophage according to any one of claims 238 to 254, wherein the bacteriophage is a non-naturally occurring T4 phage, and wherein the first coat protein is HOC and the second coat protein is SOC.

256. The bacteriophage according to any one of claims 238 to 255, wherein the bacteriophage is capable of infection of a host microbial cell.

257. The bacteriophage according to any one of claims 238 to 256, herein the host microbial organism is a bacterial cell or an archaea cell.

258. The bacteriophage according to any one of claims 238 to 257, wherein the host microbial organism is E. coli.

259. The bacteriophage according to any one of claims 238 to 258, wherein the lasso peptide component is a lasso precursor peptide, a lasso core peptide, a lasso peptide or a functional fragment of lasso peptide.

260. The bacteriophage according to claim 259, wherein the lasso precursor peptide comprises a sequence of any one of the even numbers of SEQ ID NOS:1-2630, or a sequence having greater than 30% identity of any one of the even numbers of SEQ ID NOS:1-2630.

261. A library comprising a plurality of distinct members, wherein each member is bacteriophage according any one of claims 238 to 260, wherein the first fusion proteins in the distinct members comprise distinct lasso peptide components.

262. The library according to claim 261, further comprising a solid support comprising a plurality of unique locations, wherein each unique location contains a distinct member.

263. A method for making a member of a bacteriophage display library comprising
providing a system comprising (i) a first nucleic acid sequence encoding one or more structural proteins of a bacteriophage; (ii) a second nucleic acid sequence encoding a first fusion protein comprising a lasso peptide component fused to a first coat protein of the bacteriophage; and (iii) a third nucleic acid sequence encoding at least one lasso peptide biosynthesis component.
introducing the system into a population of microbial cells or a cell-free biosynthesis reaction mixture;
incubating the population of microbial cells or the cell-free biosynthesis reaction mixture under a suitable condition to produce a plurality of bacteriophages each displaying the lasso peptide component on the first coat protein; and
wherein the lasso peptide biosynthesis component processes the lasso peptide component into a lasso peptide or a functional fragment of lasso peptide.

264. The method of claim 263, wherein the first nucleic acid sequence comprises a mutated genome of the bacteriophage devoid of an endogenous sequence encoding the first coat protein.

265. The method of claim 264, wherein the first nucleic acid sequence and the second nucleic acid sequence are in the same nucleic acid molecule.

266. The method of claim 264, wherein the first, second and third nucleic acid sequences are in the same nucleic acid molecule.

267. The method of claim 264, wherein the first nucleic acid sequence and the second nucleic acid sequence in different nucleic acid molecules that are configured to undergo homologous recombination to produce a recombinant sequence encoding the structural proteins and the first fusion protein.

268. The method of any one of claim 263 to 267, wherein the step of introducing the system into the population of microbial cells comprises infecting the population of microbial cells with a bacteriophage having a mutated genome comprising the first nucleic acid.

269. The method of any one of claim 263 to 268, wherein the step of introducing the system into the population of microbial cells comprises transfecting the population of microbial cells with one or more vectors comprising the second and/or third nucleic acid sequence.

270. The method of any one of claims 264 to 269
wherein the first nucleic acid comprises a mutated genome of the bacteriophage devoid of an endogenous sequence encoding a second coat protein of the bacteriophage,
wherein the second nucleic acid sequence further encodes a second fusion protein comprising an identification peptide fused to the second coat protein; and
wherein the step of incubating comprises incubating the population of microbial cells or cell-free biosynthesis reaction mixture under a suitable condition to produce a plurality of bacteriophages each displaying the lasso peptide component on the first coat protein and the identification peptide on the second coat protein.

271. The method of claim 270, further comprising identifying the lasso peptide component based on the identification peptide.

272. The method of claim 271, wherein the identification peptide is a purification tag, and the method further comprises purifying the produced plurality of bacteriophages.

273. The method of claim 263, wherein the first nucleic acid sequence comprises a wild-type genome of the bacteriophage.

274. The method of claim 263, wherein the one or more structural proteins encoded by the first nucleic acid sequence comprises wild-type first coat protein.

275. The method of claim 274, wherein the first and second nucleic acid sequences are in the same nucleic acid molecule.

276. The method of claim 274,
wherein the one or more structural proteins encoded by the first nucleic acid sequence further comprises a wild-type second coat protein;
wherein the second nucleic acid sequence further encodes a second fusion protein comprising an identification peptide fused to the second coat protein; and
wherein the step of incubating comprises incubating the population of microbial cells or cell-flee biosynthesis reaction mixture under a suitable condition to produce a plurality of bacteriophages each comprising the wild-type second coat protein and the second fusion protein.

277. The method of claim 276, further comprising identifying the lasso peptide component based on the identification peptide.

278. The method of claim 276, wherein the identification peptide is a purification tag, and the method further comprises purifying the produced plurality of bacteriophages.

279. The method of any one of claims 275 to 276, wherein the first, second and third nucleic acid sequences are in the same nucleic acid molecule.

280. The method of any one of claim 275 to 279, wherein the nucleic acid molecule comprises a mutated genome of the bacteriophage.

281. The method of any one of claims 263 to 280, wherein the step of incubating is performed at a unique location configured to identify the lasso peptide component.

282. The method of claim 281, further comprising identifying the lasso peptide component based on the unique location.

283. The method of any one of claims 263 to 282, wherein the bacteriophage is a non-naturally occurring T4 page, T7 phage or λ (lambda) phage.

284. The method of any one of claims 263 to 283, wherein the bacteriophage is a non-naturally occurring T4 page, and wherein the first coat protein is HOC and the second coat protein is SOC.

285. A method for making a member of a bacteriophage display library comprising contacting a first bacteriophage devoid of a first nonessential outer capsid protein with a first fusion protein comprising a lasso peptide component fused to the first nonessential outer capsid protein of the bacteriophage under a suitable condition to produce a second bacteriophage displaying the lasso peptide component on the first coat protein.

286. The method of claim 285,
wherein the first bacteriophage is further devoid of a second nonessential outer capsid protein, and
wherein the method further comprises contacting the second bacteriophage with a second fusion protein comprising an identification peptide fused with the second nonessential outer capsid protein under a suitable condition to produce a third bacteriophage displaying the lasso peptide component on the first coat protein and the identification peptide on the second coat protein.

287. The method of claim 285 or 286, further comprising contacting the second or the third bacteriophage with at least one lasso peptide biosynthesis component under a suitable condition to process the lasso peptide component into a lasso peptide or a functional fragment of lasso peptide.

288. The method of any one of claims 285 to 287, wherein the first bacteriophage comprises a mutated genome devoid of an endogenous sequence encoding the first nonessential outer capsid protein.

289. The method of any one of claims 285 to 288, wherein the first bacteriophage comprises a mutated genome devoid of an endogenous sequence encoding the second nonessential outer capsid protein.

290. The method of any one of claims 285 to 289, wherein the first bacteriophage comprises a mutated genome comprising an exogenous sequence encoding the first fusion protein.

291. The method of any one of claims 285 to 290, wherein the first bacteriophage comprises a mutated genome comprising an exogenous sequence encoding the second fusion protein.

292. The method of any one of claims 285 to 287, wherein the first bacteriophage comprises a wild-type genome of the bacteriophage.

293. The method of any one of claims 285 to 292, wherein the second or third bacteriophage is a non-naturally existing T4 phage, T7 phage or λ (lambda) phage.

294. The method of any one of claims 285 to 293, wherein the second or third bacteriophage is a non-naturally existing T4 phage, and wherein the first nonessential outer capsid protein is HOC, and the second nonessential outer capsid protein is SOC.

The application's sequence listing, which the Patent Office published only in electronic form, follows.

SEQUENCE LISTING (2660 sequences)

SEQ ID NO: 1 - DNA, 120 bp, Caulobacter sp.
  CDS (1)..(120)
atgactcaagtctctccctcgcccctgcggctcatccgtgtcgggcgcgccctcgatctgacccgttcgatcggcgactccggtctgcgggagtccatgagctcgcagacctactggccc

SEQ ID NO: 2 - protein, 40 aa, Caulobacter sp.
MTQVSPSPLRLIRVGRALDLTRSIGDSGLRESMSSQTYWP

SEQ ID NO: 3 - DNA, 117 bp, Caulobacter sp.
  CDS (1)..(117)
atgaccccgatccaatccaagttctgccttctgcgcgtcggttcggccaagcgcctgacccagtccttcgatgtcggcaccatcaaggaaggtctcgtcagccaatactacttcgcc

SEQ ID NO: 4 - protein, 39 aa, Caulobacter sp.
MTPIQSKFCLLRVGSAKRLTQSFDVGTIKEGLVSQYYFA

SEQ ID NO: 5 - DNA, 117 bp, Caulobacter sp.; identical to SEQ ID NO: 3
  CDS (1)..(117)

SEQ ID NO: 6 - protein, 39 aa, Caulobacter sp.; identical to SEQ ID NO: 4

SEQ ID NO: 7 - DNA, 120 bp, Caulobacter sp.; identical to SEQ ID NO: 1
  CDS (1)..(120)

SEQ ID NO: 8 - protein, 40 aa, Caulobacter sp.; identical to SEQ ID NO: 2

SEQ ID NO: 9 - DNA, 117 bp, Caulobacter henricii
  CDS (1)..(117)
atgacccccgtcaccccgcgcgtcgccctgctgcgtctgggcgccgccaagtccctgacccggtccatcgaggaggggacgatcaaggaagccggcagcagccagtactacttcgtc

SEQ ID NO: 10 - protein, 39 aa, Caulobacter henricii
MTPVTPRVALLRLGAAKSLTRSIEEGTIKEAGSSQYYFV

SEQ ID NO: 11 - DNA, 117 bp, Caulobacter henricii
  CDS (1)..(117)
atgtccaagttcaccgcgacccttcgcgtgatccgcctcggcggcgcgctcgatctgacccgctcggtcgacgacgagggcctgcgcgagccgatgcaaccccagctcgcctggttc

SEQ ID NO: 12 - protein, 39 aa, Caulobacter henricii
MSKFTATLRVIRLGGALDLTRSVDDEGLREPMQPQLAWF

SEQ ID NO: 13 - DNA, 117 bp, Caulobacter henricii
  CDS (1)..(117)
atgacccccgtcaccccgcgcgtcgctctgctgcgtctgggcgccgccaagtccctgacccggtccatcgaggatgggacgatcaaggaagccggcagcagccagtactacttcgtc

SEQ ID NO: 14 - protein, 39 aa, Caulobacter henricii
MTPVTPRVALLRLGAAKSLTRSIEDGTIKEAGSSQYYFV

SEQ ID NO: 15 - DNA, 117 bp, Caulobacter henricii; identical to SEQ ID NO: 11
  CDS (1)..(117)

SEQ ID NO: 16 - protein, 39 aa, Caulobacter henricii; identical to SEQ ID NO: 12

SEQ ID NO: 17 - DNA, 102 bp, Actinobacteria bacterium
  CDS (1)..(102)
atgctccaggaagtcggcgacttcgaggagctcacgaagtgcctcggcgtcggaagctgcaacgacttcgccggctgcggctacgcgatcgtctgcttctgg

SEQ ID NO: 18 - protein, 34 aa, Actinobacteria bacterium
MLQEVGDFEELTKCLGVGSCNDFAGCGYAIVCFW

SEQ ID NO: 19 - DNA, 102 bp, Actinobacteria bacterium; identical to SEQ ID NO: 17
  CDS (1)..(102)

SEQ ID NO: 20 - protein, 34 aa, Actinobacteria bacterium; identical to SEQ ID NO: 18

SEQ ID NO: 21 - DNA, 126 bp, Streptomyces griseorubens
  CDS (1)..(126)
atgaccgcgatctacgagccgcccgccctgcaggagatcggcgacttcgacgagctcaccaagtgcctcggcatcgggagctgcaacgacttcgccggctgcggttacgccgtcgtctgcttctgg

SEQ ID NO: 22 - protein, 42 aa, Streptomyces griseorubens
MTAIYEPPALQEIGDFDELTKCLGIGSCNDFAGCGYAVVCFW

SEQ ID NO: 23 - DNA, 126 bp, Streptomyces griseorubens; identical to SEQ ID NO: 21
  CDS (1)..(126)

SEQ ID NO: 24 - protein, 42 aa, Streptomyces griseorubens; identical to SEQ ID NO: 22

SEQ ID NO: 25 - DNA, 126 bp, Streptomyces griseorubens; identical to SEQ ID NO: 21
  CDS (1)..(126)

SEQ ID NO: 26 - protein, 42 aa, Streptomyces griseorubens; identical to SEQ ID NO: 22

SEQ ID NO: 27 - DNA, 126 bp, Streptomyces sp.
  CDS (1)..(126)
atgtccgccacgtacgagccccccgcgttgcaggagatcggcgacttcgacgagctcaccaagtgcctcggcgtcgggagctgcaacgacttcgccggctgcggctacgccatcgtctgcttctgg

SEQ ID NO: 28 - protein, 42 aa, Streptomyces sp.
MSATYEPPALQEIGDFDELTKCLGVGSCNDFAGCGYAIVCFW

SEQ ID NO: 29 - DNA, 141 bp, Burkholderia thailandensis
  CDS (1)..(141)
atggttcgacttttggcgaagctgcttcgttcgacgatccacggctccaacggtgtcagcctggacgcggtttcctcgacgcacggcaccccgggtttccaaaccccggacgctcgcgtcatttcgcgctttgggttcaat

SEQ ID NO: 30 - protein, 47 aa, Burkholderia thailandensis
MVRLLAKLLRSTIHGSNGVSLDAVSSTHGTPGFQTPDARVISRFGFN

SEQ ID NO: 31 - DNA, 141 bp, Burkholderia thailandensis; identical to SEQ ID NO: 29
  CDS (1)..(141)

SEQ ID NO: 32 - protein, 47 aa, Burkholderia thailandensis; identical to SEQ ID NO: 30

SEQ ID NO: 33 - DNA, 141 bp, Burkholderia thailandensis; identical to SEQ ID NO: 29
  CDS (1)..(141)

SEQ ID NO: 34 - protein, 47 aa, Burkholderia thailandensis; identical to SEQ ID NO: 30

SEQ ID NO: 35 - DNA, 141 bp, Burkholderia thailandensis; identical to SEQ ID NO: 29
  CDS (1)..(141)

SEQ ID NO: 36 - protein, 47 aa, Burkholderia thailandensis; identical to SEQ ID NO: 30

SEQ ID NO: 37 - DNA, 141 bp, Burkholderia thailandensis; identical to SEQ ID NO: 29
  CDS (1)..(141)

SEQ ID NO: 38 - protein, 47 aa, Burkholderia thailandensis; identical to SEQ ID NO: 30

SEQ ID NO: 39 - DNA, 141 bp, Burkholderia thailandensis; identical to SEQ ID NO: 29
  CDS (1)..(141)

SEQ ID NO: 40 - protein, 47 aa, Burkholderia thailandensis; identical to SEQ ID NO: 30

SEQ ID NO: 41 - DNA, 141 bp, Burkholderia thailandensis; identical to SEQ ID NO: 29
  CDS (1)..(141)

SEQ ID NO: 42 - protein, 47 aa, Burkholderia thailandensis; identical to SEQ ID NO: 30

SEQ ID NO: 43 - DNA, 141 bp, Burkholderia thailandensis; identical to SEQ ID NO: 29
  CDS (1)..(141)

SEQ ID NO: 44 - protein, 47 aa, Burkholderia thailandensis; identical to SEQ ID NO: 30

SEQ ID NO: 45 - DNA, 141 bp, Burkholderia oklahomensis
  CDS (1)..(141)
atggttcgatttttggcgaagctgcttcgttcgacgatccacggctccaacggtgtcagccttgacgcggtttcctcgactcatggcactccgggcttccaaacgccggacgctcgcgtcatttcgcgcttcgggttcaat

SEQ ID NO: 46 - protein, 47 aa, Burkholderia oklahomensis
MVRFLAKLLRSTIHGSNGVSLDAVSSTHGTPGFQTPDARVISRFGFN

SEQ ID NO: 47 - DNA, 141 bp, Burkholderia mallei
  CDS (1)..(141)
atggttcgatttttggcgaagctgcttcgttcgacgatccacggctcccacggtgtcagccttgacgcggtttcctcgactcacggcacgccgggcttccaaaccccggacgcacgcgtcatttcgcgcttcgggttcaat

SEQ ID NO: 48 - protein, 47 aa, Burkholderia mallei
MVRFLAKLLRSTIHGSHGVSLDAVSSTHGTPGFQTPDARVISRFGFN

SEQ ID NO: 49 - DNA, 141 bp, Burkholderia oklahomensis; identical to SEQ ID NO: 45
  CDS (1)..(141)

SEQ ID NO: 50 - protein, 47 aa, Burkholderia oklahomensis; identical to SEQ ID NO: 46

SEQ ID NO: 51 - DNA, 141 bp, Burkholderia mallei; identical to SEQ ID NO: 47
  CDS (1)..(141)

SEQ ID NO: 52 - protein, 47 aa, Burkholderia mallei; identical to SEQ ID NO: 48

SEQ ID NO: 53 - DNA, 141 bp, Burkholderia mallei; identical to SEQ ID NO: 47
  CDS (1)..(141)

SEQ ID NO: 54 - protein, 47 aa, Burkholderia mallei; identical to SEQ ID NO: 48

SEQ ID NO: 55 - DNA, 141 bp, Burkholderia mallei; identical to SEQ ID NO: 47
  CDS (1)..(141)

SEQ ID NO: 56 - protein, 47 aa, Burkholderia mallei; identical to SEQ ID NO: 48

SEQ ID NO: 57 - DNA, 141 bp, Burkholderia mallei; identical to SEQ ID NO: 47
  CDS (1)..(141)

SEQ ID NO: 58 - protein, 47 aa, Burkholderia mallei; identical to SEQ ID NO: 48

SEQ ID NO: 59 - DNA, 141 bp, Burkholderia mallei; identical to SEQ ID NO: 47
  CDS (1)..(141)

SEQ ID NO: 60 - protein, 47 aa, Burkholderia mallei; identical to SEQ ID NO: 48

SEQ ID NO: 61 - DNA, 141 bp, Burkholderia mallei; identical to SEQ ID NO: 47
  CDS (1)..(141)

SEQ ID NO: 62 - protein, 47 aa, Burkholderia mallei; identical to SEQ ID NO: 48

SEQ ID NO: 63 - DNA, 141 bp, Burkholderia mallei; identical to SEQ ID NO: 47
  CDS (1)..(141)

SEQ ID NO: 64 - protein, 47 aa, Burkholderia mallei; identical to SEQ ID NO: 48

SEQ ID NO: 65 - DNA, 141 bp, Burkholderia mallei; identical to SEQ ID NO: 47
  CDS (1)..(141)

SEQ ID NO: 66 - protein, 47 aa, Burkholderia mallei; identical to SEQ ID NO: 48

SEQ ID NO: 67 - DNA, 141 bp, Burkholderia mallei; identical to SEQ ID NO: 47
  CDS (1)..(141)

SEQ ID NO: 68 - protein, 47 aa, Burkholderia mallei; identical to SEQ ID NO: 48

SEQ ID NO: 69 - DNA, 141 bp, Burkholderia mallei; identical to SEQ ID NO: 47
  CDS (1)..(141)

SEQ ID NO: 70 - protein, 47 aa, Burkholderia mallei; identical to SEQ ID NO: 48

SEQ ID NO: 71 - DNA, 141 bp, Burkholderia mallei; identical to SEQ ID NO: 47
  CDS (1)..(141)

SEQ ID NO: 72 - protein, 47 aa, Burkholderia mallei; identical to SEQ ID NO: 48

SEQ ID NO: 73 - DNA, 141 bp, Burkholderia mallei; identical to SEQ ID NO: 47
  CDS (1)..(141)

SEQ ID NO: 74 - protein, 47 aa, Burkholderia mallei; identical to SEQ ID NO: 48

SEQ ID NO: 75 - DNA, 141 bp, Burkholderia mallei; identical to SEQ ID NO: 47
  CDS (1)..(141)

SEQ ID NO: 76 - protein, 47 aa, Burkholderia mallei; identical to SEQ ID NO: 48

SEQ ID NO: 77 - DNA, 141 bp, Burkholderia mallei; identical to SEQ ID NO: 47
  CDS (1)..(141)

SEQ ID NO: 78 - protein, 47 aa, Burkholderia mallei; identical to SEQ ID NO: 48

SEQ ID NO: 79 - DNA, 141 bp, Burkholderia mallei; identical to SEQ ID NO: 47
  CDS (1)..(141)

SEQ ID NO: 80 - protein, 47 aa, Burkholderia mallei; identical to SEQ ID NO: 48

SEQ ID NO: 81 - DNA, 141 bp, Burkholderia mallei; identical to SEQ ID NO: 47
  CDS (1)..(141)

SEQ ID NO: 82 - protein, 47 aa, Burkholderia mallei; identical to SEQ ID NO: 48

SEQ ID NO: 83 - DNA, 141 bp, Burkholderia mallei; identical to SEQ ID NO: 47
  CDS (1)..(141)

SEQ ID NO: 84 - protein, 47 aa, Burkholderia mallei; identical to SEQ ID NO: 48

SEQ ID NO: 85 - DNA, 141 bp, Burkholderia mallei; identical to SEQ ID NO: 47
  CDS (1)..(141)

SEQ ID NO: 86 - protein, 47 aa, Burkholderia mallei; identical to SEQ ID NO: 48

SEQ ID NO: 87 - DNA, 141 bp, Burkholderia mallei; identical to SEQ ID NO: 47
  CDS (1)..(141)

SEQ ID NO: 88 - protein, 47 aa, Burkholderia mallei; identical to SEQ ID NO: 48

SEQ ID NO: 89 - DNA, 141 bp, Burkholderia mallei; identical to SEQ ID NO: 47
  CDS (1)..(141)

SEQ ID NO: 90 - protein, 47 aa, Burkholderia mallei; identical to SEQ ID NO: 48

SEQ ID NO: 91 - DNA, 141 bp, Burkholderia mallei; identical to SEQ ID NO: 47
  CDS (1)..(141)

SEQ ID NO: 92 - protein, 47 aa, Burkholderia mallei; identical to SEQ ID NO: 48

SEQ ID NO: 93 - DNA, 141 bp, Burkholderia mallei; identical to SEQ ID NO: 47
  CDS (1)..(141)

SEQ ID NO: 94 - protein, 47 aa, Burkholderia mallei; identical to SEQ ID NO: 48

SEQ ID NO: 95 - DNA, 141 bp, Burkholderia mallei; identical to SEQ ID NO: 47
  CDS (1)..(141)

SEQ ID NO: 96 - protein, 47 aa, Burkholderia mallei; identical to SEQ ID NO: 48

SEQ ID NO: 97 - DNA, 141 bp, Burkholderia mallei; identical to SEQ ID NO: 47
  CDS (1)..(141)

SEQ ID NO: 98 - protein, 47 aa, Burkholderia mallei; identical to SEQ ID NO: 48

SEQ ID NO: 99 - DNA, 141 bp, Burkholderia mallei; identical to SEQ ID NO: 47
  CDS (1)..(141)

SEQ ID NO: 100 - protein, 47 aa, Burkholderia mallei; identical to SEQ ID NO: 48

SEQ ID NO: 101 - DNA, 141 bp, Burkholderia mallei; identical to SEQ ID NO: 47
  CDS (1)..(141)

SEQ ID NO: 102 - protein, 47 aa, Burkholderia mallei; identical to SEQ ID NO: 48

SEQ ID NO: 103 - DNA, 141 bp, Burkholderia mallei; identical to SEQ ID NO: 47
  CDS (1)..(141)

SEQ ID NO: 104 - protein, 47 aa, Burkholderia mallei; identical to SEQ ID NO: 48

SEQ ID NO: 105 - DNA, 141 bp, Burkholderia mallei; identical to SEQ ID NO: 47
  CDS (1)..(141)

SEQ ID NO: 106 - protein, 47 aa, Burkholderia mallei; identical to SEQ ID NO: 48

SEQ ID NO: 107 - DNA, 141 bp, Burkholderia mallei; identical to SEQ ID NO: 47
  CDS (1)..(141)

SEQ ID NO: 108 - protein, 47 aa, Burkholderia mallei; identical to SEQ ID NO: 48

SEQ ID NO: 109 - DNA, 141 bp, Burkholderia mallei; identical to SEQ ID NO: 47
  CDS (1)..(141)

SEQ ID NO: 110 - protein, 47 aa, Burkholderia mallei; identical to SEQ ID NO: 48

SEQ ID NO: 111 - DNA, 141 bp, Burkholderia mallei; identical to SEQ ID NO: 47
  CDS (1)..(141)

SEQ ID NO: 112 - protein, 47 aa, Burkholderia mallei; identical to SEQ ID NO: 48

SEQ ID NO: 113 - DNA, 141 bp, Burkholderia mallei; identical to SEQ ID NO: 47
  CDS (1)..(141)

SEQ ID NO: 114 - protein, 47 aa, Burkholderia mallei; identical to SEQ ID NO: 48

SEQ ID NO: 115 - DNA, 141 bp, Burkholderia mallei; identical to SEQ ID NO: 47
  CDS (1)..(141)

SEQ ID NO: 116 - protein, 47 aa, Burkholderia mallei; identical to SEQ ID NO: 48

SEQ ID NO: 117 - DNA, 141 bp, Burkholderia mallei; identical to SEQ ID NO: 47
  CDS (1)..(141)

SEQ ID NO: 118 - protein, 47 aa, Burkholderia mallei; identical to SEQ ID NO: 48

SEQ ID NO: 119 - DNA, 141 bp, Burkholderia mallei; identical to SEQ ID NO: 47
  CDS (1)..(141)

SEQ ID NO: 120 - protein, 47 aa, Burkholderia mallei; identical to SEQ ID NO: 48

SEQ ID NO: 121 - DNA, 141 bp, Burkholderia mallei; identical to SEQ ID NO: 47
  CDS (1)..(141)

SEQ ID NO: 122 - protein, 47 aa, Burkholderia mallei; identical to SEQ ID NO: 48

SEQ ID NO: 123 - DNA, 141 bp, Burkholderia mallei; identical to SEQ ID NO: 47
  CDS (1)..(141)

SEQ ID NO: 124 - protein, 47 aa, Burkholderia mallei; identical to SEQ ID NO: 48

SEQ ID NO: 125 - DNA, 141 bp, Burkholderia mallei; identical to SEQ ID NO: 47
  CDS (1)..(141)

SEQ ID NO: 126 - protein, 47 aa, Burkholderia mallei; identical to SEQ ID NO: 48

SEQ ID NO: 127 - DNA, 141 bp, Burkholderia mallei; identical to SEQ ID NO: 47
  CDS (1)..(141)

SEQ ID NO: 128 - protein, 47 aa, Burkholderia mallei; identical to SEQ ID NO: 48

SEQ ID NO: 129 - DNA, 141 bp, Burkholderia mallei; identical to SEQ ID NO: 47
  CDS (1)..(141)

SEQ ID NO: 130 - protein, 47 aa, Burkholderia mallei; identical to SEQ ID NO: 48

SEQ ID NO: 131 - DNA, 141 bp, Burkholderia mallei; identical to SEQ ID NO: 47
  CDS (1)..(141)

SEQ ID NO: 132 - protein, 47 aa, Burkholderia mallei; identical to SEQ ID NO: 48

SEQ ID NO: 133 - DNA, 141 bp, Burkholderia mallei; identical to SEQ ID NO: 47
  CDS (1)..(141)

SEQ ID NO: 134 - protein, 47 aa, Burkholderia mallei; identical to SEQ ID NO: 48

SEQ ID NO: 135 - DNA, 141 bp, Burkholderia sp.
  CDS (1)..(141)
atggttcgacttttggcgaagcttctccgtatcacggcccaaggctccagcggcgtcagcctggacgcggtttcctcgacgcacggcacgccgggcttccaaacgccggacaatcgcgtcatttcgcgcttcggattcaat

SEQ ID NO: 136 - protein, 47 aa, Burkholderia sp.
MVRLLAKLLRITAQGSSGVSLDAVSSTHGTPGFQTPDNRVISRFGFN

SEQ ID NO: 137 - DNA, 141 bp, Burkholderia thailandensis; identical to SEQ ID NO: 29
  CDS (1)..(141)

SEQ ID NO: 138 - protein, 47 aa, Burkholderia thailandensis; identical to SEQ ID NO: 30

SEQ ID NO: 139 - DNA, 141 bp, Burkholderia mallei; identical to SEQ ID NO: 47
  CDS (1)..(141)

SEQ ID NO: 140 - protein, 47 aa, Burkholderia mallei; identical to SEQ ID NO: 48

SEQ ID NO: 141 - DNA, 141 bp, Burkholderia oklahomensis; identical to SEQ ID NO: 45
  CDS (1)..(141)

SEQ ID NO: 142 - protein, 47 aa, Burkholderia oklahomensis; identical to SEQ ID NO: 46

SEQ ID NO: 143 - DNA, 141 bp, Burkholderia oklahomensis; identical to SEQ ID NO: 45
  CDS (1)..(141)

SEQ ID NO: 144 - protein, 47 aa, Burkholderia oklahomensis; identical to SEQ ID NO: 46

SEQ ID NO: 145 - DNA, 120 bp, Streptomyces leeuwenhoekii
  CDS (1)..(120)
atgactgagcttcagccggaggcctacgaggcgccgtccctcatcgaggtgggcgagttctcggaggacacgctcggcttcggaagcaagccgctggacagcttcggcctgaacttcttt

SEQ ID NO: 146 - protein, 40 aa, Streptomyces leeuwenhoekii
MTELQPEAYEAPSLIEVGEFSEDTLGFGSKPLDSFGLNFF

SEQ ID NO: 147 - DNA, 132 bp, Streptomyces sp.
  CDS (1)..(132)
atggaagagcagaacgagctgtccaccgtggagccctacgccgccccgatgctggtcgaggtcggtgagttcaacgaggacaccctgggcttcatcggctggggcaaggacatcttcggccactacggcggc

SEQ ID NO: 148 - protein, 44 aa, Streptomyces sp.
MEEQNELSTVEPYAAPMLVEVGEFNEDTLGFIGWGKDIFGHYGG

SEQ ID NO: 149 - DNA, 135 bp, Streptomyces chattanoogensis
  CDS (1)..(135)
atggaagagcagaacgagctctcgaacgtagagccctacgcgcccccgatgctggtcgaggtcggcgagttcagcgaggacacgctgggcttcatcggctggggcaaggacatcttcggccactacggcggccgc

SEQ ID NO: 150 - protein, 45 aa, Streptomyces chattanoogensis
MEEQNELSNVEPYAPPMLVEVGEFSEDTLGFIGWGKDIFGHYGGR

SEQ ID NO: 151 - DNA, 135 bp, Streptomyces chattanoogensis; identical to SEQ ID NO: 149
  CDS (1)..(135)

SEQ ID NO: 152 - protein, 45 aa, Streptomyces chattanoogensis; identical to SEQ ID NO: 150

SEQ ID NO: 153 - DNA, 132 bp, Streptomyces sp.; identical to SEQ ID NO: 147
  CDS (1)..(132)

SEQ ID NO: 154 - protein, 44 aa, Streptomyces sp.; identical to SEQ ID NO: 148

SEQ ID NO: 155 - DNA, 138 bp, Streptomyces olindensis
  CDS (1)..(138)
atggacgagcagaccgagttctcgaccaccgagccgtacgcgccgccgacgctgaccgaggtcggcgagttcaacgaggacaccctcggcttcatcggctggggcgacgacatcttcggccactactccggcgacttc

SEQ ID NO: 156 - protein, 46 aa, Streptomyces olindensis
MDEQTEFSTTEPYAPPTLTEVGEFNEDTLGFIGWGDDIFGHYSGDF

SEQ ID NO: 157 - DNA, 135 bp, Streptomyces chattanoogensis; identical to SEQ ID NO: 149
  CDS (1)..(135)

SEQ ID NO: 158 - protein, 45 aa, Streptomyces chattanoogensis; identical to SEQ ID NO: 150

SEQ ID NO: 159 - DNA, 96 bp, Streptomyces bingchenggensis
  CDS (1)..(96)
atggtcacggaagccggtgacttcagcgaggtcacggccggcagcatcttcggtttccagtacgacggtggcttttacccgtacagccagtacggc

SEQ ID NO: 160 - protein, 32 aa, Streptomyces bingchenggensis
MVTEAGDFSEVTAGSIFGFQYDGGFYPYSQYG

SEQ ID NO: 161 - DNA, 132 bp, Streptomyces bingchenggensis
  CDS (1)..(132)
atgcaggcgagatcggacgagaccgtcgagagctacgaaccgccggccctggtggcggtgggtgagttctcggaggacacgctggggttcggccaccggtacgaggatgtgctcggtgagcagggctggggg

SEQ ID NO: 162 - protein, 44 aa, Streptomyces bingchenggensis
MQARSDETVESYEPPALVAVGEFSEDTLGFGHRYEDVLGEQGWG

SEQ ID NO: 163 - DNA, 138 bp, Streptomyces olindensis; identical to SEQ ID NO: 155
  CDS (1)..(138)

SEQ ID NO: 164 - protein, 46 aa, Streptomyces olindensis; identical to SEQ ID NO: 156

SEQ ID NO: 165 - DNA, 138 bp, Streptomyces sp.
  CDS (1)..(138)
atgaacgagaacatcgagatctcgaactccgagccgtacgagccgccgaccgtggtggaggtcggagagttcaacgaggacaccctgggcttcatcggctggggcaaggacatcttcggccactactcgggcggcttc

SEQ ID NO: 166 - protein, 46 aa, Streptomyces sp.
MNENIEISNSEPYEPPTVVEVGEFNEDTLGFIGWGKDIFGHYSGGF

SEQ ID NO: 167 - DNA, 141 bp, Streptomyces aurantiacus
  CDS (1)..(141)
atggaagagcagacggggatcgacgagcgcgacacggccgcgagctacgagccgccggccctcatcgccgtcggtgagttctccgaggacacgctgggcttcggcaaccggtacaacgacgttctcggcgagcagggctgg

SEQ ID NO: 168 - protein, 47 aa, Streptomyces aurantiacus
MEEQTGIDERDTAASYEPPALIAVGEFSEDTLGFGNRYNDVLGEQGW

SEQ ID NO: 169 - DNA, 132 bp, Streptomyces auratus
  CDS (1)..(132)
atgaccgagcagtccgagcagacacccgcggaatacattccgccgatgctcgtcgaggtcggcgagttcaccgaagacacgttgggcaactggcacggcacatcgcccgactggttcttcaactactactgg

SEQ ID NO: 170 - protein, 44 aa, Streptomyces auratus
MTEQSEQTPAEYIPPMLVEVGEFTEDTLGNWHGTSPDWFFNYYW

SEQ ID NO: 171 - DNA, 141 bp, Streptomyces griseus
  CDS (1)..(141)
atggagaaccagcagcagcgcgaggagccgtcggttcagcagggctacgagccgcccgcgctgacggccgtcggggagttttcggaggacacgctcggcttcggcagcgaccactccgacttcctcgccaagcaaggctgg

SEQ ID NO: 172 - protein, 47 aa, Streptomyces griseus
MENQQQREEPSVQQGYEPPALTAVGEFSEDTLGFGSDHSDFLAKQGW

SEQ ID NO: 173 - DNA, 132 bp, Streptomyces auratus; identical to SEQ ID NO: 169
  CDS (1)..(132)

SEQ ID NO: 174 - protein, 44 aa, Streptomyces auratus; identical to SEQ ID NO: 170

SEQ ID NO: 175 - DNA, 96 bp, Streptomyces bingchenggensis; identical to SEQ ID NO: 159
  CDS (1)..(96)

SEQ ID NO: 176 - protein, 32 aa, Streptomyces bingchenggensis; identical to SEQ ID NO: 160

SEQ ID NO: 177 - DNA, 132 bp, Streptomyces bingchenggensis; identical to SEQ ID NO: 161
  CDS (1)..(132)

SEQ ID NO: 178 - protein, 44 aa, Streptomyces bingchenggensis; identical to SEQ ID NO: 162

SEQ ID NO: 179 - DNA, 129 bp, Streptomyces sp.
  CDS (1)..(129)
atggaagaacaggaagctccggacactgtctaccaaccgccgatgctggccgagctcggcgaattcagtgaggacacgctgggaatcggtcacttcttctcggacggcgccggcggttacatcgttgtc

SEQ ID NO: 180 - protein, 43 aa, Streptomyces sp.
MEEQEAPDTVYQPPMLAELGEFSEDTLGIGHFFSDGAGGYIVV

SEQ ID NO: 181 - DNA, 123 bp, Microbispora rosea
  CDS (1)..(123)
atggctaagcagtcttacgtcgctccggtcctggaggaaattggcgggttccgtgaagtgacaaacggctacccctggtgggactaccgcgacctcttcggtgggcacacgttcatctcaccg

SEQ ID NO: 182 - protein, 41 aa, Microbispora rosea
MAKQSYVAPVLEEIGGFREVTNGYPWWDYRDLFGGHTFISP

SEQ ID NO: 183 - DNA, 174 bp, Escherichia coli
  CDS (1)..(174)
atgattaagcattttcattttaataaactgtcttctggtaaaaaaaataatgttccatctcctgcaaagggggttatacaaataaaaaaatcagcatcgcaactcacaaaaggtggtgcaggacatgtgcctgagtattttgtggggattggtacacctatatctttctatggc

SEQ ID NO: 184 - protein, 58 aa, Escherichia coli
MIKHFHFNKLSSGKKNNVPSPAKGVIQIKKSASQLTKGGAGHVPEYFVGIGTPISFYG

SEQ ID NO: 185 - DNA, 174 bp, Escherichia coli; identical to SEQ ID NO: 183
  CDS (1)..(174)

SEQ ID NO: 186 - protein, 58 aa, Escherichia coli; identical to SEQ ID NO: 184

SEQ ID NO: 187 - DNA, 138 bp, Rhodanobacter thiooxydans
  CDS (1)..(138)
atggacacgaacgagaacatccgcagcaacgcgcaggacgatgtcatcgagctcagcgtcgccagtgtcgagaccaaaggagtattgcccatcggcaatgagttcatgggccacgccgccactccgggaatcaccgag

SEQ ID NO: 188 - protein, 46 aa, Rhodanobacter thiooxydans
MDTNENIRSNAQDDVIELSVASVETKGVLPIGNEFMGHAATPGITE

SEQ ID NO: 189 - DNA, 138 bp, Rhodanobacter thiooxydans; identical to SEQ ID NO: 187
  CDS (1)..(138)

SEQ ID NO: 190 - protein, 46 aa, Rhodanobacter thiooxydans; identical to SEQ ID NO: 188

SEQ ID NO: 191 - DNA, 138 bp, Pseudoxanthomonas suwonensis
  CDS (1)..(138)
atgaacgcgaacgagaacacccgtaccaacccgccggaagacgtcgtcgtgctcggcacggccagcgtggaaaccaagggcgccggcgagcctggcaacgagatcctcgggttcgtgaccggggtcggaattgccgaa

SEQ ID NO: 192 - protein, 46 aa, Pseudoxanthomonas suwonensis
MNANENTRTNPPEDVVVLGTASVETKGAGEPGNEILGFVTGVGIAE

SEQ ID NO: 193 - DNA, 123 bp, Streptomonospora alba
  CDS (1)..(123)
atgagcgcttacgagatccccactctcacccgtatcggcaagttcaaggacgtcaccaagagcctcggcagctccccctacaacgacatcctgggctacccggctctgatcgtcatctacccg

SEQ ID NO: 194 - protein, 41 aa, Streptomonospora alba
MSAYEIPTLTRIGKFKDVTKSLGSSPYNDILGYPALIVIYP

SEQ ID NO: 195 - DNA, 93 bp, Streptacidiphilus jiangxiensis
  CDS (1)..(93)
atggcaccggccctcgtcgaggtcggtgagttcaacgaggacaccctcggtggctggggcacggttcccgactggttcttcaacatgaactgg

SEQ ID NO: 196 - protein, 31 aa, Streptacidiphilus jiangxiensis
MAPALVEVGEFNEDTLGGWGTVPDWFFNMNW

SEQ ID NO: 197 - DNA, 93 bp, Streptacidiphilus jiangxiensis; identical to SEQ ID NO: 195
  CDS (1)..(93)

SEQ ID NO: 198 - protein, 31 aa, Streptacidiphilus jiangxiensis; identical to SEQ ID NO: 196

SEQ ID NO: 199 - DNA, 93 bp, Streptacidiphilus anmyonensis
  CDS (1)..(93)
atggcaccggcacttgtcgaggtcggcgagttcaatgaggacaccctcggtggctggggcaccgttccggactggttcttcaacatgaagtgg

SEQ ID NO: 200 - protein, 31 aa, Streptacidiphilus anmyonensis
MAPALVEVGEFNEDTLGGWGTVPDWFFNMKW

SEQ ID NO: 201 - DNA, 93 bp, Streptacidiphilus anmyonensis; identical to SEQ ID NO: 199
  CDS (1)..(93)

SEQ ID NO: 202 - protein, 31 aa, Streptacidiphilus anmyonensis; identical to SEQ ID NO: 200

SEQ ID NO: 203 - DNA, 114 bp, Caulobacter sp.
  CDS (1)..(114)
atgaatacgctcaagacccggctgatccgtttcggctcggccaagcgcctgacccgcgccggcaccggggtgcttctcccggaaaccaaccagatcaagcggtacgacccggcc

SEQ ID NO: 204 - protein, 38 aa, Caulobacter sp.
MNTLKTRLIRFGSAKRLTRAGTGVLLPETNQIKRYDPA

SEQ ID NO: 205 - DNA, 108 bp, Caulobacter sp.
  CDS (1)..(108)
atgacgactcccaagtttcgactgatccgtctgggttcggccaagcgcctgacccgctcggggatcggggacgtgttccccgagcccaacatggttcgccgttgggac

SEQ ID NO: 206 - protein, 36 aa, Caulobacter sp.
MTTPKFRLIRLGSAKRLTRSGIGDVFPEPNMVRRWD

SEQ ID NO: 207 - DNA, 117 bp, Sphingobium barthaii
  CDS (1)..(117)
atggaacgtgacaatgacgtgatcgaactcggcgcggtcagcgtggaaaccaaggggcccggcggcatcaccggcgatgtcgggcttggtgaaaataatttcggcctttccgacgac

SEQ ID NO: 208 - protein, 39 aa, Sphingobium barthaii
MERDNDVIELGAVSVETKGPGGITGDVGLGENNFGLSDD

SEQ ID NO: 209 - DNA, 117 bp, Sphingobium barthaii; identical to SEQ ID NO: 207
  CDS (1)..(117)

SEQ ID NO: 210 - protein, 39 aa, Sphingobium barthaii; identical to SEQ ID NO: 208

SEQ ID NO: 211 - DNA, 117 bp, Sphingobium chlorophenolicum
  CDS (1)..(117)
atggaacgcgaatatggcgtgatcgaactcggcgccgtcagcgtcgagaccaagggtttgggcggaccgaccggcgatgttggtatcggcgaacagccggccggcctgtccgacgac

SEQ ID NO: 212 - protein, 39 aa, Sphingobium chlorophenolicum
MEREYGVIELGAVSVETKGLGGPTGDVGIGEQPAGLSDD

SEQ ID NO: 213 - DNA, 117 bp, Sphingobium chlorophenolicum
  CDS (1)..(117)
atggaacgcaaggaagatgtgatcgatctcggcgccgccagcattgaaacaaagggcatgggcggcctgcgcgaagatcttgcgatcggcgaaccctttaccggtcttgccgacgat

SEQ ID NO: 214 - protein, 39 aa, Sphingobium chlorophenolicum
MERKEDVIDLGAASIETKGMGGLREDLAIGEPFTGLADD

SEQ ID NO: 215 - DNA, 117 bp, Sphingobium xenophagum
  CDS (1)..(117)
atggaacgcgaagacactctgatcgacctcgggaccgcaagcatcgagaccaagggaccgggcggcatcgccggcgatgtcggcctgaaccaggaactcaccggcctgtcggacgat

SEQ ID NO: 216 - protein, 39 aa, Sphingobium xenophagum
MEREDTLIDLGTASIETKGPGGIAGDVGLNQELTGLSDD

SEQ ID NO: 217 - DNA, 117 bp, Sphingobium xenophagum; identical to SEQ ID NO: 215
  CDS (1)..(117)

SEQ ID NO: 218 - protein, 39 aa, Sphingobium xenophagum; identical to SEQ ID NO: 216

SEQ ID NO: 219 - DNA, 117 bp, Sphingobium barthaii; identical to SEQ ID NO: 207
  CDS (1)..(117)

SEQ ID NO: 220 - protein, 39 aa, Sphingobium barthaii; identical to SEQ ID NO: 208

SEQ ID NO: 221 - DNA, 99 bp, Burkholderia rhizoxinica
  CDS (1)..(99)
atggagctgtgcgcgtcgtcagagacgctgggcggtgcgggacagtacaaggaagtggaagctggccgctggagtgatcgcattgactccgacgacgaa

SEQ ID NO: 222 - protein, 33 aa, Burkholderia rhizoxinica
MELCASSETLGGAGQYKEVEAGRWSDRIDSDDE

SEQ ID NO: 223 - DNA, 123 bp, Burkholderia rhizoxinica
  CDS (1)..(123)
  misc_feature (16)..(18): The codon at these positions can code for Val or Leu
atgcatcaggaagcaktggacctcttgttggatgatgagtcgctgatggagctgtgtgcttccgaatcgactctaggcggttcagggaaatataaggaagctggcgttggccgcttcctagat

SEQ ID NO: 224 - protein, 41 aa, Burkholderia rhizoxinica
  MOD_RES (6)..(6): Val or Leu
MHQEAXDLLLDDESLMELCASESTLGGSGKYKEAGVGRFLD

SEQ ID NO: 225 - DNA, 132 bp, Glomeribacter sp.
  CDS (1)..(132)
atgaccaagagcaaagaactaagccaagatattcaattggaagaaaccctaatggaattttgtgcttctgaagcaaccatgggcgcggtaggagagaagaacgaagccggctttggtaaatacgatgacgtg

SEQ ID NO: 226 - protein, 44 aa, Glomeribacter sp.
MTKSKELSQDIQLEETLMEFCASEATMGAVGEKNEAGFGKYDDV

SEQ ID NO: 227 - DNA, 132 bp, Glomeribacter sp.; identical to SEQ ID NO: 225
  CDS (1)..(132)

SEQ ID NO: 228 - protein, 44 aa, Glomeribacter sp.; identical to SEQ ID NO: 226

SEQ ID NO: 229 - DNA, 129 bp, Glomeribacter sp.
  CDS (1)..(129)
atgattaagaatcaagagctcaatcaagatatccagttagatgatgaagcgctgacgcaattttgcgcttctgaagcaaccatgggtggttcagggcaatataaagaagcgggcgttggccgattccta

SEQ ID NO: 230 - protein, 43 aa, Glomeribacter sp.
MIKNQELNQDIQLDDEALTQFCASEATMGGSGQYKEAGVGRFL

SEQ ID NO: 231 - DNA, 132 bp, Glomeribacter sp.
  CDS (1)..(132)
atgaccaatagcaaagaaattaaaatacaagagactcaattgcaagacgaaactctgagcgagttttgtgcctccaaagcaactatgggcggttcaggacaatatagagaagcaggcgttggccggttccta

SEQ ID NO: 232 - protein, 44 aa, Glomeribacter sp.
MTNSKEIKIQETQLQDETLSEFCASKATMGGSGQYREAGVGRFL

SEQ ID NO: 233 - DNA, 129 bp, Glomeribacter sp.
  CDS (1)..(129)
atgattaagaatcaagagctcaatcaagatatccagttagatgatgaagtgctgacgcaattttgtgcttctgaagcaaccatgggtggctcaggaaaatataaagaagcgggtgttggccgattccta

SEQ ID NO: 234 - protein, 43 aa, Glomeribacter sp.
MIKNQELNQDIQLDDEVLTQFCASEATMGGSGKYKEAGVGRFL

SEQ ID NO: 235 - DNA, 126 bp, Streptomyces scabrisporus
  CDS (1)..(126)
atgacgtacgacgacagctacgggcctccgacgctggtcgaggtcggcgacttcaccgaactgaccctcggcctctggtgggggtgcccgcaggacgtcttcggcggcctgacgccgctcgcctgc

SEQ ID NO: 236 - protein, 42 aa, Streptomyces scabrisporus
MTYDDSYGPPTLVEVGDFTELTLGLWWGCPQDVFGGLTPLAC

SEQ ID NO: 237 - DNA, 129 bp, Streptomyces roseosporus
  CDS (1)..(129)
atgaagcagcagaagcagcagaagaaggcttacgtgaagccgtcgatgttccagcagggcgacttctcgaagaaaaccgccggctacttcgtcggctcgtacaaggagtactggagccggcggatcatc

SEQ ID NO: 238 - protein, 43 aa, Streptomyces roseosporus
MKQQKQQKKAYVKPSMFQQGDFSKKTAGYFVGSYKEYWSRRII

SEQ ID NO: 239 - DNA, 129 bp, Streptomyces roseosporus; identical to SEQ ID NO: 237
  CDS (1)..(129)

SEQ ID NO: 240 - protein, 43 aa, Streptomyces roseosporus; identical to SEQ ID NO: 238

SEQ ID NO: 241 - DNA, 129 bp, Streptomyces roseosporus; identical to SEQ ID NO: 237
  CDS (1)..(129)

SEQ ID NO: 242 - protein, 43 aa, Streptomyces roseosporus; identical to SEQ ID NO: 238

SEQ ID NO: 243 - DNA, 129 bp, Streptomyces roseosporus; identical to SEQ ID NO: 237
  CDS (1)..(129)

SEQ ID NO: 244 - protein, 43 aa, Streptomyces roseosporus; identical to SEQ ID NO: 238

SEQ ID NO: 245 - DNA, 129 bp, Streptomyces griseus
  CDS (1)..(129)
atgaagcagcagaagcagcagaagaaggcttacgtgaagccgtcgatgttccagcagggcgacttctcgaagaagaccgccggctacttcgtcggctcgtacaaggagtactggacccggcgcatcgtc

SEQ ID NO: 246 - protein, 43 aa, Streptomyces griseus
MKQQKQQKKAYVKPSMFQQGDFSKKTAGYFVGSYKEYWTRRIV

SEQ ID NO: 247 - DNA, 129 bp, Streptomyces griseus; identical to SEQ ID NO: 245
  CDS (1)..(129)

SEQ ID NO: 248 - protein, 43 aa, Streptomyces griseus; identical to SEQ ID NO: 246

SEQ ID NO: 249 - DNA, 129 bp, Streptomyces griseus
  CDS (1)..(129)
atgaagcagcagaagcagcagaagaaggcttacgtgaagccgtcgatgttccagcagggcgacttctcgaagaagaccgccggctacttcgtcggctcgtacaaggagtactggacccggcgcatcatc

SEQ ID NO: 250 - protein, 43 aa, Streptomyces griseus
MKQQKQQKKAYVKPSMFQQGDFSKKTAGYFVGSYKEYWTRRII

SEQ ID NO: 251 - DNA, 129 bp, Streptomyces griseus; identical to SEQ ID NO: 245
  CDS (1)..(129)

SEQ ID NO: 252 - protein, 43 aa, Streptomyces griseus; identical to SEQ ID NO: 246

SEQ ID NO: 253 - DNA, 129 bp, Streptomyces griseus; identical to SEQ ID NO: 249
  CDS (1)..(129)

SEQ ID NO: 254 - protein, 43 aa, Streptomyces griseus; identical to SEQ ID NO: 250

SEQ ID NO: 255 - DNA, 129 bp, Streptomyces griseus; identical to SEQ ID NO: 249
  CDS (1)..(129)

SEQ ID NO: 256 - protein, 43 aa, Streptomyces griseus; identical to SEQ ID NO: 250

SEQ ID NO: 257 - DNA, 129 bp, Streptomyces griseus; identical to SEQ ID NO: 249
  CDS (1)..(129)

SEQ ID NO: 258 - protein, 43 aa, Streptomyces griseus; identical to SEQ ID NO: 250

SEQ ID NO: 259 - DNA, 129 bp, Streptomyces globisporus
  CDS (1)..(129)
atgaagcagcagaagcagcagaagaaggcttacgtgaagccgtcgatgcaccagcagggcgacttctcgaagaagaccgccggctacttcgtcggctcgtacaaggagtactggacccggcgcatcatc

SEQ ID NO: 260 - protein, 43 aa, Streptomyces globisporus
MKQQKQQKKAYVKPSMHQQGDFSKKTAGYFVGSYKEYWTRRII

SEQ ID NO: 261 - DNA, 120 bp, Streptomyces albus
  CDS (1)..(120)
atgaagcagcagaagaaggcttacgtgaagccgtcgctgttcaagcagggcgacttttcgaagaagaccgccggttacttctacggctcgtacaaggagtactgggtccgccgcatcatc

SEQ ID NO: 262 - protein, 40 aa, Streptomyces albus
MKQQKKAYVKPSLFKQGDFSKKTAGYFYGSYKEYWVRRII

SEQ ID NO: 263 - DNA, 120 bp, Streptomyces albus; identical to SEQ ID NO: 261
  CDS (1)..(120)

SEQ ID NO: 264 - protein, 40 aa, Streptomyces albus; identical to SEQ ID NO: 262

SEQ ID NO: 265 - DNA, 120 bp, Streptomyces albus; identical to SEQ ID NO: 261
  CDS (1)..(120)

SEQ ID NO: 266 - protein, 40 aa, Streptomyces albus; identical to SEQ ID NO: 262

SEQ ID NO: 267 - DNA, 120 bp, Streptomyces albus; identical to SEQ ID NO: 261
  CDS (1)..(120)

SEQ ID NO: 268 - protein, 40 aa, Streptomyces albus; identical to SEQ ID NO: 262

SEQ ID NO: 269 - DNA, 120 bp, Streptomyces albus; identical to SEQ ID NO: 261
  CDS (1)..(120)

SEQ ID NO: 270 - protein, 40 aa, Streptomyces albus; identical to SEQ ID NO: 262

SEQ ID NO: 271 - DNA, 120 bp, Streptomyces albus; identical to SEQ ID NO: 261
  CDS (1)..(120)

SEQ ID NO: 272 - protein, 40 aa, Streptomyces albus; identical to SEQ ID NO: 262

SEQ ID NO: 273 - DNA, 120 bp, Streptomyces albus; identical to SEQ ID NO: 261
  CDS (1)..(120)

SEQ ID NO: 274 - protein, 40 aa, Streptomyces albus; identical to SEQ ID NO: 262

SEQ ID NO: 275 - DNA, 120 bp, Streptomyces albus; identical to SEQ ID NO: 261
  CDS (1)..(120)

SEQ ID NO: 276 - protein, 40 aa, Streptomyces albus; identical to SEQ ID NO: 262

SEQ ID NO: 277 - DNA, 120 bp, Streptomyces albus; identical to SEQ ID NO: 261
  CDS (1)..(120)

SEQ ID NO: 278 - protein, 40 aa, Streptomyces albus; identical to SEQ ID NO: 262

SEQ ID NO: 279 - DNA, 120 bp, Streptomyces albus; identical to SEQ ID NO: 261
  CDS (1)..(120)

SEQ ID NO: 280 - protein, 40 aa, Streptomyces albus; identical to SEQ ID NO: 262

SEQ ID NO: 281 - DNA, 120 bp, Streptomyces albus; identical to SEQ ID NO: 261
  CDS (1)..(120)

SEQ ID NO: 282 - protein, 40 aa, Streptomyces albus; identical to SEQ ID NO: 262

SEQ ID NO: 283 - DNA, 120 bp, Streptomyces albus; identical to SEQ ID NO: 261
  CDS (1)..(120)

SEQ ID NO: 284 - protein, 40 aa, Streptomyces albus; identical to SEQ ID NO: 262

SEQ ID NO: 285 - DNA, 120 bp, Streptomyces sp.
  CDS (1)..(120)
atgaagctgcggaagaaggcttacgtgaagccgtcgctgttcaagcagggcgacttttcgaagaagaccgccggttacttctacggctcgtacaaggagtactgggtccgtcgcatcagc

SEQ ID NO: 286 - protein, 40 aa, Streptomyces sp.
MKLRKKAYVKPSLFKQGDFSKKTAGYFYGSYKEYWVRRIS

SEQ ID NO: 287 - DNA, 120 bp, Streptomyces albus; identical to SEQ ID NO: 261
  CDS (1)..(120)

SEQ ID NO: 288 - protein, 40 aa, Streptomyces albus; identical to SEQ ID NO: 262

SEQ ID NO: 289 - DNA, 120 bp, Streptomyces albus; identical to SEQ ID NO: 261
  CDS (1)..(120)

SEQ ID NO: 290 - protein, 40 aa, Streptomyces albus; identical to SEQ ID NO: 262

SEQ ID NO: 291 - DNA, 120 bp, Streptomyces albus; identical to SEQ ID NO: 261
  CDS (1)..(120)

SEQ ID NO: 292 - protein, 40 aa, Streptomyces albus; identical to SEQ ID NO: 262

SEQ ID NO: 293 - DNA, 120 bp, Streptomyces albus; identical to SEQ ID NO: 261
  CDS (1)..(120)

SEQ ID NO: 294 - protein, 40 aa, Streptomyces albus; identical to SEQ ID NO: 262

SEQ ID NO: 295 - DNA, 120 bp, Streptomyces anulatus
  CDS (1)..(120)
atgaagctgcagaagaaggcttatgtgaagccgtcgctgttcaagcagggcgacttttcgaagaagaccgccggctacttcgtcggctcgtacaaggagtactggacccggcgcatcgtc

SEQ ID NO: 296 - protein, 40 aa, Streptomyces anulatus
MKLQKKAYVKPSLFKQGDFSKKTAGYFVGSYKEYWTRRIV

SEQ ID NO: 297 - DNA, 123 bp, Streptomyces alboviridis
  CDS (1)..(123)
atgaagctgcagaagaaggcttacgtgaagccgtcgctgttcaagcagggcgacttctcgaagaagaccgccggttacttcgtcggctcgtacaaggagtactgggttcggcgcatcgtctac

SEQ ID NO: 298 - protein, 41 aa, Streptomyces alboviridis
MKLQKKAYVKPSLFKQGDFSKKTAGYFVGSYKEYWVRRIVY

SEQ ID NO: 299 - DNA, 123 bp, Streptomyces alboviridis; identical to SEQ ID NO: 297
  CDS (1)..(123)

SEQ ID NO: 300 - protein, 41 aa, Streptomyces alboviridis; identical to SEQ ID NO: 298

SEQ ID NO: 301 - DNA, 123 bp, Streptomyces alboviridis; identical to SEQ ID NO: 297
  CDS (1)..(123)

SEQ ID NO: 302 - protein, 41 aa, Streptomyces alboviridis; identical to SEQ ID NO: 298

SEQ ID NO: 303 - DNA, 123 bp, Streptomyces luridiscabiei
  CDS (1)..(123)
atgaagccgcagaagaaggcttacgtgaagccgtcgctgttcaagcagggcgacttctcgaagaagaccgccggttacttcgtcggctcgtacaaggagtactgggtccggcgcatcgtctac

SEQ ID NO: 304 - protein, 41 aa, Streptomyces luridiscabiei
MKPQKKAYVKPSLFKQGDFSKKTAGYFVGSYKEYWVRRIVY

SEQ ID NO: 305 - DNA, 96 bp, Streptomyces sp.
  CDS (1)..(96)
atgaagccgtcgctgttcaagcagggcgacttttcgaagaagaccgccggttacttctacggctcgtacaaggagtactgggtccggcgcatcatc

SEQ ID NO: 306 - protein, 32 aa, Streptomyces sp.
MKPSLFKQGDFSKKTAGYFYGSYKEYWVRRII

SEQ ID NO: 307 - DNA, 120 bp, Streptomyces albus; identical to SEQ ID NO: 261
  CDS (1)..(120)

SEQ ID NO: 308 - protein, 40 aa, Streptomyces albus; identical to SEQ ID NO: 262

SEQ ID NO: 309 - DNA, 168 bp, Streptomyces cyaneofuscatus
gtgcacagggagccggtcggcggatcagatgatgcgccggacccagtactccttgtacgagccgtagaagtaaccggcggtcttcttcgaaaagtcgccctgcttgaacagcgacggcttcacgtaagccttcttctgctgcttcatgacaccttccttctgtgcggt

SEQ ID NO: 310 - protein, 56 aa, Streptomyces cyaneofuscatus
MHREPVGGSDDAPDPVLLVRAVEVTGGLLRKVALLEQRRLHVSLLLLLHDTFLLCG

SEQ ID NO: 311 - DNA, 120 bp, Streptomyces albus; identical to SEQ ID NO: 261
  CDS (1)..(120)

SEQ ID NO: 312 - protein, 40 aa, Streptomyces albus; identical to SEQ ID NO: 262

SEQ ID NO: 313 - DNA, 96 bp, Streptomyces sp.; identical to SEQ ID NO: 305
  CDS (1)..(96)

SEQ ID NO: 314 - protein, 32 aa, Streptomyces sp.; identical to SEQ ID NO: 306

SEQ ID NO: 315 - DNA, 96 bp, Streptomyces sp.; identical to SEQ ID NO: 305
  CDS (1)..(96)

SEQ ID NO: 316 - protein, 32 aa, Streptomyces sp.; identical to SEQ ID NO: 306

SEQ ID NO: 317 - DNA, 129 bp, Streptomyces roseosporus; identical to SEQ ID NO: 237
  CDS (1)..(129)

SEQ ID NO: 318 - protein, 43 aa, Streptomyces roseosporus; identical to SEQ ID NO: 238

SEQ ID NO: 319 - DNA, 153 bp, Asticcacaulis excentricus
  CDS (1)..(153)
atgcatacccccattatttcggaaacggtccaaccgaagaccgctggcctcatcgttctgggcaaggcttcagctgagacccgcggtctcagccagggtgtcgagcccgatatcggccagacctacttcgaagagtctcgcatcaaccaggac

SEQ ID NO: 320 - protein, 51 aa, Asticcacaulis excentricus
MHTPIISETVQPKTAGLIVLGKASAETRGLSQGVEPDIGQTYFEESRINQD

SEQ ID NO: 321 - DNA, 153 bp, Asticcacaulis excentricus; identical to SEQ ID NO: 319
  CDS (1)..(153)

SEQ ID NO: 322 - protein, 51 aa, Asticcacaulis excentricus; identical to SEQ ID NO: 320

SEQ ID NO: 323 - DNA, 138 bp, Rhodococcus jostii
  CDS (1)..(138)
atgacctctcagccgagcaagaagacgtacaatgcaccgagcctggtgcagcgggggaagttcgcacgaaccacagcaggttctcagctggtctatcgcgagtgggtcgggcattcaaacgtcattaagcccggcccc

SEQ ID NO: 324 - protein, 46 aa, Rhodococcus jostii
MTSQPSKKTYNAPSLVQRGKFARTTAGSQLVYREWVGHSNVIKPGP

SEQ ID NO: 325 - DNA, 114 bp, Rubrivivax gelatinosus
  CDS (1)..(114)
atggacgaagagctggaactggagatcgtcgacctgggtgacgccaaggaactgacgcagggcgcgccgagcctgatcaactcggaagacaacccggccttcccgcagcgcgtc

SEQ ID NO: 326 - protein, 38 aa, Rubrivivax gelatinosus
MDEELELEIVDLGDAKELTQGAPSLINSEDNPAFPQRV

SEQ ID NO: 327 - DNA, 114 bp, Rubrivivax gelatinosus; identical to SEQ ID NO: 325
  CDS (1)..(114)

SEQ ID NO: 328 - protein, 38 aa, Rubrivivax gelatinosus; identical to SEQ ID NO: 326

SEQ ID NO: 329 - DNA, 147 bp, Xanthomonas citri
  CDS (1)..(147)
atgaaaacgttcgtcgatagcgctccgagccaggaagaccatggcaaggacatcatcgtgctcggaattgccagtgtggaaacccagggcggcgcgggagccggtgaggtgaatgggatgtcccccatcgccggcatctccgaagaa

SEQ ID NO: 330 - protein, 49 aa, Xanthomonas citri
MKTFVDSAPSQEDHGKDIIVLGIASVETQGGAGAGEVNGMSPIAGISEE

SEQ ID NO: 331 - DNA, 138 bp, Xanthomonas gardneri
  CDS (1)..(138)
atgaacagcaacgacaccacccacagcgatgcatccaacgagatcacggtgcttggcgttgccagcaccgacaccaaaggcggcccgctcgctggcgaagaaatcggcggcttcaatgtgcccggcatttccgaagag

SEQ ID NO: 332 - protein, 46 aa, Xanthomonas gardneri
MNSNDTTHSDASNEITVLGVASTDTKGGPLAGEEIGGFNVPGISEE

SEQ ID NO: 333 - DNA, 144 bp, Xanthomonas gardneri
  CDS (1)..(144)
atggataccagcaacaacgacgctcgcaccacggcgttggatcaggatctcatcgtgctaggggtcgcaagcctggacacacagggcgggccattggcaggcgaagaaatgggtggcatcaccaccctgggcatcagccaggac

SEQ ID NO: 334 - protein, 48 aa, Xanthomonas gardneri
MDTSNNDARTTALDQDLIVLGVASLDTQGGPLAGEEMGGITTLGISQD

SEQ ID NO: 335 - DNA, 138 bp, Xanthomonas hortorum
  CDS (1)..(138)
atgaacagcaacgacaccactcacagcgatgcatccagcgagatcacggtgcttggcgttgccagcaccgacaccaaaggcggcccgctcgctggcgaagaaatcggcggcttcaatgtacccggcatttccgaagag

SEQ ID NO: 336 - protein, 46 aa, Xanthomonas hortorum
MNSNDTTHSDASSEITVLGVASTDTKGGPLAGEEIGGFNVPGISEE

SEQ ID NO: 337 - DNA, 144 bp, Xanthomonas hortorum
  CDS (1)..(144)
atggataccagcaacaacgacgctcgcgccaccgcgttggatcaggatctcatcgtactcggggtcgcaagcctggacacacagggcgggccattggcaggcgaagaaatgggtggcatcaccaccctgggcatcagccaggac

SEQ ID NO: 338 - protein, 48 aa, Xanthomonas hortorum
MDTSNNDARATALDQDLIVLGVASLDTQGGPLAGEEMGGITTLGISQD

SEQ ID NO: 339 - DNA, 138 bp, Xanthomonas arboricola
  CDS (1)..(138)
atgaacatcaatgacaccacctacagcgatgcgtccagcgagatcacggtgcttggcgtcgccagcaccgataccaaaggcggcccgctggctggcgaagagatcggcggcttcaatgtgcctggcatttccgaagag

SEQ ID NO: 340 - protein, 46 aa, Xanthomonas arboricola
MNINDTTYSDASSEITVLGVASTDTKGGPLAGEEIGGFNVPGISEE

SEQ ID NO: 341 - DNA, 144 bp, Xanthomonas gardneri; identical to SEQ ID NO: 333
  CDS (1)..(144)

SEQ ID NO: 342 - protein, 48 aa, Xanthomonas gardneri; identical to SEQ ID NO: 334

SEQ ID NO: 343 - DNA, 138 bp, Xanthomonas arboricola
  CDS (1)..(138)
atgaacatcaatgacaccacccacagcgacgcatccagcgagatcacggtgcttggcgttgccagcaccgacaccaaaggcggcccgctcgctggcgaagaaatcggcggcttcaacgtgcctggcatttccgaagag

SEQ ID NO: 344 - protein, 46 aa, Xanthomonas arboricola
MNINDTTHSDASSEITVLGVASTDTKGGPLAGEEIGGFNVPGISEE

SEQ ID NO: 345 - DNA, 144 bp, Xanthomonas arboricola
  CDS (1)..(144)
atggataccagcaacaacgacgcgcataccacgacgtctggccaggatctcatcgtacttggcatcgcaagcctggacacacagggcgggccattggcaggcgaagaaatgggcggcatcaccacgctgggcatcagccaggac

SEQ ID NO: 346 - protein, 48 aa, Xanthomonas arboricola
MDTSNNDAHTTTSGQDLIVLGIASLDTQGGPLAGEEMGGITTLGISQD

SEQ ID NO: 347 - DNA, 138 bp, Xanthomonas cannabis
  CDS (1)..(138)
atgaacatcaatgacaccacccacaccgatgcatccagcgagatcacggtgcttggcgttgccagcaccgacaccaagggcggcccgctcgctggcgaagaaatcggcggcttcaatgtgccgggcatttccgaagag

SEQ ID NO: 348 - protein, 46 aa, Xanthomonas cannabis
MNINDTTHTDASSEITVLGVASTDTKGGPLAGEEIGGFNVPGISEE

SEQ ID NO: 349 - DNA, 144 bp, Xanthomonas cannabis
  CDS (1)..(144)
atggataccagcaacaacgacgcgcataccacgacgtctggccaggatctcatcgtgcttggcatcgcaagcctggacacacagggcgggccactcgcaggcgaagaaatgggcggcatcaccgcgctgggcatcagccaggac

SEQ ID NO: 350 - protein, 48 aa, Xanthomonas cannabis
MDTSNNDAHTTTSGQDLIVLGIASLDTQGGPLAGEEMGGITALGISQD

SEQ ID NO: 351 - DNA, 135 bp, Xanthomonas arboricola
  CDS (1)..(135)
atgaacatcaatgacaccacccacagcgattccagcgagatcacggtgcttggcgttgccagcaccgataccaaaggcggcccgctcgctggcgaagaaatcggcggcttcaacgtgcctggcatttccgaagag

SEQ ID NO: 352 - protein, 45 aa, Xanthomonas arboricola
MNINDTTHSDSSEITVLGVASTDTKGGPLAGEEIGGFNVPGISEE

SEQ ID NO: 353 - DNA, 144 bp, Xanthomonas campestris
  CDS (1)..(144)
atggataccagcaacaacgacgcgcacaccacgacgtttggtcaggatctcatcgtgcttgggatcgcaagcctggacacgcagggcgggccactggcaggcgaagaaatgggtggcatcaccacgctgggcatcagccaggac

SEQ ID NO: 354 - protein, 48 aa, Xanthomonas campestris
MDTSNNDAHTTTFGQDLIVLGIASLDTQGGPLAGEEMGGITTLGISQD

SEQ ID NO: 355 - DNA, 138 bp, Xanthomonas arboricola; identical to SEQ ID NO: 343
  CDS (1)..(138)

SEQ ID NO: 356 - protein, 46 aa, Xanthomonas arboricola; identical to SEQ ID NO: 344

SEQ ID NO: 357 - DNA, 144 bp, Xanthomonas campestris
  CDS (1)..(144)
atggataccagcaacaacgacgcgcacaccacgacgtttggtcaggatctcatcgtgcttgggatcgcaagcctggacacacagggcgggccattggcaggcgaagaaatgggtggcatcaccacgctgggcatcagccacgac

SEQ ID NO: 358 - protein, 48 aa, Xanthomonas campestris
MDTSNNDAHTTTFGQDLIVLGIASLDTQGGPLAGEEMGGITTLGISHD

SEQ ID NO: 359 - DNA, 138 bp, Xanthomonas cannabis; identical to SEQ ID NO: 347
  CDS (1)..(138)

SEQ ID NO: 360 - protein, 46 aa, Xanthomonas cannabis; identical to SEQ ID NO: 348

SEQ ID NO: 361 - DNA, 144 bp, Xanthomonas cannabis; identical to SEQ ID NO: 349
  CDS (1)..(144)

SEQ ID NO: 362 - protein, 48 aa, Xanthomonas cannabis; identical to SEQ ID NO: 350

SEQ ID NO: 363 - DNA, 138 bp, Xanthomonas arboricola; identical to SEQ ID NO: 343
  CDS (1)..(138)

SEQ ID NO: 364 - protein, 46 aa, Xanthomonas arboricola; identical to SEQ ID NO: 344

SEQ ID NO: 365 - DNA, 144 bp, Xanthomonas arboricola
  CDS (1)..(144)
atggataccagcaacaacgacgcgcacaccacgacgtttggtcaggatctcatcgtgcttgggatcgcaagcctggacacgcagggcgggccactggcaggcgaagaaatgggtggcagcaccacgctgggcatcagccaggac

SEQ ID NO: 366 - protein, 48 aa, Xanthomonas arboricola
MDTSNNDAHTTTFGQDLIVLGIASLDTQGGPLAGEEMGGSTTLGISQD

SEQ ID NO: 367 - DNA, 138 bp, Xanthomonas arboricola; identical to SEQ ID NO: 343
  CDS (1)..(138)

SEQ ID NO: 368 - protein, 46 aa, Xanthomonas arboricola; identical to SEQ ID NO: 344

SEQ ID NO: 369 - DNA, 144 bp, Xanthomonas arboricola; identical to SEQ ID NO: 365
  CDS (1)..(144)

SEQ ID NO: 370 - protein, 48 aa, Xanthomonas arboricola; identical to SEQ ID NO: 366

SEQ ID NO: 371 - DNA, 138 bp, Xanthomonas arboricola; identical to SEQ ID NO: 343
  CDS (1)..(138)

SEQ ID NO: 372 - protein, 46 aa, Xanthomonas arboricola; identical to SEQ ID NO: 344

SEQ ID NO: 373 - DNA, 144 bp, Xanthomonas arboricola; identical to SEQ ID NO: 365
  CDS (1)..(144)

SEQ ID NO: 374 - protein, 48 aa, Xanthomonas arboricola; identical to SEQ ID NO: 366

SEQ ID NO: 375 - DNA, 138 bp, Xanthomonas arboricola
  CDS (1)..(138)
atgaacatcaatgacaccacctacaacgatgcatccagcgagatcacggtgcttggcgttgccagcaccgacaccaaaggcggcccgctcgctggcgaagaaatcggcggcttcaacgtgcctggcatttccgaagag

SEQ ID NO: 376 - protein, 46 aa, Xanthomonas arboricola
MNINDTTYNDASSEITVLGVASTDTKGGPLAGEEIGGFNVPGISEE

SEQ ID NO: 377 - DNA, 144 bp, Xanthomonas arboricola; identical to SEQ ID NO: 365
  CDS (1)..(144)

SEQ ID NO: 378 - protein, 48 aa, Xanthomonas arboricola; identical to SEQ ID NO: 366

SEQ ID NO: 379 - DNA, 138 bp, Xanthomonas arboricola; identical to SEQ ID NO: 343
  CDS (1)..(138)

SEQ ID NO: 380 - protein, 46 aa, Xanthomonas arboricola; identical to SEQ ID NO: 344

SEQ ID NO: 381 - DNA, 144 bp, Xanthomonas arboricola; identical to SEQ ID NO: 365
  CDS (1)..(144)

SEQ ID NO: 382 - protein, 48 aa, Xanthomonas arboricola; identical to SEQ ID NO: 366

SEQ ID NO: 383 - DNA, 138 bp, Xanthomonas arboricola; identical to SEQ ID NO: 343
  CDS (1)..(138)

SEQ ID NO: 384 - protein, 46 aa, Xanthomonas arboricola; identical to SEQ ID NO: 344

SEQ ID NO: 385 - DNA, 144 bp, Xanthomonas campestris; identical to SEQ ID NO: 353
  CDS (1)..(144)

SEQ ID NO: 386 - protein, 48 aa, Xanthomonas campestris; identical to SEQ ID NO: 354

SEQ ID NO: 387 - DNA, 138 bp, Xanthomonas sp.
  CDS (1)..(138)
atgaacacgaacgacaacaacagccgcaatccgcaggccgacgtgatcgaagtcggcatcgcaagcctcgacactgccggccccgccgttttcggcgaggaaatcggtggtctcgccagccccggaatctccgaggac

SEQ ID NO: 388 - protein, 46 aa, Xanthomonas sp.
MNTNDNNSRNPQADVIEVGIASLDTAGPAVFGEEIGGLASPGISED

SEQ ID NO: 389 - DNA, 147 bp, Xanthomonas sp.
  CDS (1)..(147)
atggataacaacgcaaccacctcagtcagcgatctgactgccggcgtggacgtgcacgtacttggcatcgcaagtgtcgatacgcacggcgtccgcaacaccggcgaagacatgggcggcatcacaaccgccggcatctccgacgac

SEQ ID NO: 390 - protein, 49 aa, Xanthomonas sp.
MDNNATTSVSDLTAGVDVHVLGIASVDTHGVRNTGEDMGGITTAGISDD

SEQ ID NO: 391 - DNA, 132 bp, Sphingobium yanoikuyae
  CDS (1)..(132)
atggaacgcaacagcgaagaccgccgtgacgacgtcgtcgaactcggcgcggtgagcgtcgaaaccaagggcatctccggtggaacggtcgatgcgcctgccggccagggccttgccggtatcctcgacgac

SEQ ID NO: 392 - protein, 44 aa, Sphingobium yanoikuyae
MERNSEDRRDDVVELGAVSVETKGISGGTVDAPAGQGLAGILDD

SEQ ID NO: 393 - DNA, 132 bp, Sphingobium yanoikuyae; identical to SEQ ID NO: 391
  CDS (1)..(132)

SEQ ID NO: 394 - protein, 44 aa, Sphingobium yanoikuyae; identical to SEQ ID NO: 392

SEQ ID NO: 395 - DNA, 132 bp, Sphingobium yanoikuyae; identical to SEQ ID NO: 391
  CDS (1)..(132)

SEQ ID NO: 396 - protein, 44 aa, Sphingobium yanoikuyae; identical to SEQ ID NO: 392

SEQ ID NO: 397 - DNA, 132 bp, Novosphingobium sp.
  CDS (1)..(132)
atggaacgcaccagcgaagaccgccgtgacgacgtcgtcgaactcggcgcggtgagcgtcgaaaccaagggcatcgtcggcaaccccgtcgatgcgcccgcaggccaaggccttgccggcatcctcgacgac

SEQ ID NO: 398 - protein, 44 aa, Novosphingobium sp.
MERTSEDRRDDVVELGAVSVETKGIVGNPVDAPAGQGLAGILDD

SEQ ID NO: 399 - DNA, 132 bp, Sphingopyxis alaskensis
  CDS (1)..(132)
atgaaagacttcaacgaactgatcgacctcggcgccatcagcgtcgaaacccgcggtatcgagccgctcggaccggtcgacgaggatcagggcgaacattatctgttcgccggcggcatcacggccgacgac

SEQ ID NO: 400 - protein, 44 aa, Sphingopyxis alaskensis
MKDFNELIDLGAISVETRGIEPLGPVDEDQGEHYLFAGGITADD

SEQ ID NO: 401 - DNA, 141 bp, Sphingopyxis alaskensis
  CDS (1)..(141)
atggaagacagagacgccaagttggagcttttggaccttggtgcgattagtgcgcagacgcgcggtttggaaccggtcggccccgtcgaggaagacaccggctcgcgctacatacccttcgcaggaatcggcgaatacgat

SEQ ID NO: 402 - protein, 47 aa, Sphingopyxis alaskensis
MEDRDAKLELLDLGAISAQTRGLEPVGPVEEDTGSRYIPFAGIGEYD

SEQ ID NO: 403 - DNA, 132 bp, Sphingopyxis alaskensis; identical to SEQ ID NO: 399
  CDS (1)..(132)

SEQ ID NO: 404 - protein, 44 aa, Sphingopyxis alaskensis; identical to SEQ ID NO: 400

SEQ ID NO: 405 - DNA, 141 bp, Sphingopyxis alaskensis; identical to SEQ ID NO: 401
  CDS (1)..(141)

SEQ ID NO: 406 - protein, 47 aa, Sphingopyxis alaskensis; identical to SEQ ID NO: 402

SEQ ID NO: 407 - DNA, 141 bp, Sphingopyxis sp.
  CDS (1)..(141)
atgaagaatctgcagaacagcgacgagctgatcgaactcggcgcgatcagcgtcgaaacccgcggcatcgaacccgtgggtccgcgggacgaggacacgaaccagcactatctgttcgtcggcggcatcacgaccgacgac

SEQ ID NO: 408 - protein, 47 aa, Sphingopyxis sp.
MKNLQNSDELIELGAISVETRGIEPVGPRDEDTNQHYLFVGGITTDD

SEQ ID NO: 409 - DNA, 141 bp, Novosphingobium resinovorum
  CDS (1)..(141)
atgaaaaatctgcagaacagcgacgaggccatcgaactcggcgcgatcagctgcgaaacccgcggcatcgatcccgtcggtccgcgcgacgaggcaaccggtgagcatttcctgctcagcggcggcatcacgaccgacgac

SEQ ID NO: 410 - protein, 47 aa, Novosphingobium resinovorum
MKNLQNSDEAIELGAISCETRGIDPVGPRDEATGEHFLLSGGITTDD

SEQ ID NO: 411 - DNA, 114 bp, Sphingopyxis sp.
  CDS (1)..(114)
atgattgatctcggtgccatcagcgtcgagacacgcggcatcaagcaactcggcgagcccgatttcgaagatggcgatcattacggcctcgtcggcgcaatcagcaccgacgat

SEQ ID NO: 412 - protein, 38 aa, Sphingopyxis sp.
MIDLGAISVETRGIKQLGEPDFEDGDHYGLVGAISTDD

SEQ ID NO: 413 - DNA, 114 bp, Sphingopyxis sp.; identical to SEQ ID NO: 411
  CDS (1)..(114)

SEQ ID NO: 414 - protein, 38 aa, Sphingopyxis sp.; identical to SEQ ID NO: 412

SEQ ID NO: 415 - DNA, 114 bp, Sphingopyxis sp.; identical to SEQ ID NO: 411
  CDS (1)..(114)

SEQ ID NO: 416 - protein, 38 aa, Sphingopyxis sp.; identical to SEQ ID NO: 412

SEQ ID NO: 417 - DNA, 141 bp, Sphingopyxis sp.; identical to SEQ ID NO: 407
  CDS (1)..(141)

SEQ ID NO: 418 - protein, 47 aa, Sphingopyxis sp.; identical to SEQ ID NO: 408

SEQ ID NO: 419 - DNA, 138 bp, Sphingopyxis macrogoltabida
  CDS (1)..(138)
atgaaacagcaggacagcagtgacctgatcgacctcggcgccgtcggcgtcgagacccgaggcatcgaaccggtcggtccccgcgatgaagataccaacgagcacttcctgctcgtcggcggcatcaccgctgaagac

SEQ ID NO: 420 - protein, 46 aa, Sphingopyxis macrogoltabida
MKQQDSSDLIDLGAVGVETRGIEPVGPRDEDTNEHFLLVGGITAED

SEQ ID NO: 421 - DNA, 144 bp, Sphingopyxis sp.
  CDS (1)..(144)
atgaagactttgcagcacagcgatgaactgatcgacctgggtgcaatcagcaccgaaacccgtggcctcgaaccgatcggcaagcccgacgtcgagcagggtgaccactatccgttcggcggcggcgccatcagcgccgacgat

SEQ ID NO: 422 - protein, 48 aa, Sphingopyxis sp.
MKTLQHSDELIDLGAISTETRGLEPIGKPDVEQGDHYPFGGGAISADD

SEQ ID NO: 423 - DNA, 99 bp, Sphingopyxis sp.
  CDS (1)..(99)
atggtcgaccttggcgcgatcagcaccgaaactcgcggtgccgagcccctcggcataccggaggcagaattgggcaattatgacatcggcgccgacgac

SEQ ID NO: 424 - protein, 33 aa, Sphingopyxis sp.
MVDLGAISTETRGAEPLGIPEAELGNYDIGADD

SEQ ID NO: 425 - DNA, 132 bp, Sphingopyxis alaskensis
  CDS (1)..(132)
atggaacgcaccgaagtaatcgaggaggtcatcgacctgggcaaggcgtcggtcgaaaccaagggcgaggcgctgatcgatcaggatgtcggcggcggccggcagcagttcctcaccggaatcgcgcaggac

SEQ ID NO: 426 - protein, 44 aa, Sphingopyxis alaskensis
MERTEVIEEVIDLGKASVETKGEALIDQDVGGGRQQFLTGIAQD

SEQ ID NO: 427 - DNA, 132 bp, Sphingopyxis alaskensis; identical to SEQ ID NO: 425
  CDS (1)..(132)

SEQ ID NO: 428 - protein, 44 aa, Sphingopyxis alaskensis; identical to SEQ ID NO: 426

SEQ ID NO: 429 - DNA, 132 bp, Caulobacter sp.
  CDS (1)..(132)
atggaacggatcgaagaccacatcgacgacgaactgatcgacctgggcgcggcgagcgtcgagacccagggcgacgtgctgaacgcgccggagccgggcatcggccgggagcccacgggcctgtcccgggac

SEQ ID NO: 430 - protein, 44 aa, Caulobacter sp.
MERIEDHIDDELIDLGAASVETQGDVLNAPEPGIGREPTGLSRD

SEQ ID NO: 431 - DNA, 132 bp, Caulobacter sp.
  CDS (1)..(132)
atgcaacggatcatcgacgagaccacggacggtctgatcgagctgggcgctgcaagcgtgcagacccagggcgatgtcctcttcgcgcccgagccgggcgtcggccgcccgcccatgggcctgtcggaagac

SEQ ID NO: 432 - protein, 44 aa, Caulobacter sp.
MQRIIDETTDGLIELGAASVQTQGDVLFAPEPGVGRPPMGLSED

SEQ ID NO: 433 - DNA, 132 bp, Caulobacter sp.
  CDS (1)..(132)
atggaatttgaaggcatcccttccccggacgcgcggatcgatctcggcttagcgagtgaagaaacctgcggccaaatctacgatcaccccgaagtgggcatcggcgcttatggttgcgaaggattgcagcgg

SEQ ID NO: 434 - protein, 44 aa, Caulobacter sp.
MEFEGIPSPDARIDLGLASEETCGQIYDHPEVGIGAYGCEGLQR

SEQ ID NO: 435 - DNA, 96 bp, Phenylobacterium zucineum
  CDS (1)..(96)
atgagcgttcggctgctgggcttcggcagcgccaaggccgcgaccaacggcggcatcggcggtgacttcgaagacctgaacaagccgttcgacgtc

SEQ ID NO: 436 - protein, 32 aa, Phenylobacterium zucineum
MSVRLLGFGSAKAATNGGIGGDFEDLNKPFDV

SEQ ID NO: 437 - DNA, 111 bp, Caulobacter segnis
gtgaccaagacccatcgcctgatccgcctgggcgacgcccagcgtctgacccaaggcacgctcactccgggcctgccggaggatttcctgcctggccactacatgccgggc

SEQ ID NO: 438 - protein, 37 aa, Caulobacter segnis
MTKTHRLIRLGDAQRLTQGTLTPGLPEDFLPGHYMPG

SEQ ID NO: 439 - DNA, 111 bp, Caulobacter segnis
  CDS (1)..(111)
atgacgtctaggtttcaactgctgcgattgggcaaggccgacaggctgacgcggggcgcgctggtgggcctgctgctcgaggacatcaccgtggcccgctacgacccgatg

SEQ ID NO: 440 - protein, 37 aa, Caulobacter segnis
MTSRFQLLRLGKADRLTRGALVGLLLEDITVARYDPM

SEQ ID NO: 441 - DNA, 126 bp, Caulobacter segnis
  CDS (1)..(126)
atgaccaagaagaacgccacccaagccccgcgtctcgtgcgcgtcggcgacgcccatcgcctgacgcaaggcgcgttcgtcggccagcccgaagcggtcaatccgctcggccgcgaaatccaaggc

SEQ ID NO: 442 - protein, 42 aa, Caulobacter segnis
MTKKNATQAPRLVRVGDAHRLTQGAFVGQPEAVNPLGREIQG

SEQ ID NO: 443 - DNA, 117 bp, Caulobacter sp.
  CDS (1)..(117)
atgaccaagacccatcgcaccccccgcctggtccgcgtcggcgacgcccatcgcctcacgcaaggctcgatcgtcggccgtcccgaggacttcctgccgggccgtcagaccccggcc

SEQ ID NO: 444 - protein, 39 aa, Caulobacter sp.
MTKTHRTPRLVRVGDAHRLTQGSIVGRPEDFLPGRQTPA

SEQ ID NO: 445 - DNA, 108 bp, Caulobacter sp.
  CDS (1)..(108)
atgtcacgcacctttcgcctgatccgcgtgggcgacgcccatcgcctgacccagagcggcatcatgggctggcccgaggacatcctgccgggacgccacatgcaggtt

SEQ ID NO: 446 - protein, 36 aa, Caulobacter sp.
MSRTFRLIRVGDAHRLTQSGIMGWPEDILPGRHMQV

SEQ ID NO: 447 - DNA, 180 bp, Caulobacter sp.
ttgaatatacgtccgcgccgccgcctccttgtcccgccgcgccttcgcggctttgggaaggagattgacgtgacctcatcgtttcgactgatccgccttggcgacgctcaccgcctgacccagggcgccttgctgggcctgctgttggaagacgtcaccacggctcgctacaacccgacc

SEQ ID NO: 448 - protein, 60 aa, Caulobacter sp.
MNIRPRRRLLVPPRLRGFGKEIDVTSSFRLIRLGDAHRLTQGALLGLLLEDVTTARYNPT

SEQ ID NO: 449 - DNA, 132 bp, Streptomyces sviceus
  CDS (1)..(132)
atgacctcgaccgacgagctgtacgaggcgcccgagctcatcgagatcggtgactacgccgaactcacgcgctgtgtgtggggcggagactgcaccgacttcctcggctgcggcaccgcctggatctgtgtc

SEQ ID NO: 450 - protein, 44 aa, Streptomyces sviceus
MTSTDELYEAPELIEIGDYAELTRCVWGGDCTDFLGCGTAWICV

SEQ ID NO: 451 - DNA, 132 bp, Streptomyces sviceus; identical to SEQ ID NO: 449
  CDS (1)..(132)

SEQ ID NO: 452 - protein, 44 aa, Streptomyces sviceus; identical to SEQ ID NO: 450

SEQ ID NO: 453 - DNA, 129 bp, Kibdelosporangium sp.
  CDS (1)..(129)
atgatcaaggatgacgagatctacgaggtgccgacgctggtcgaggtcggcgacttcgccgaactgacgctgggtctgccgtggggctgcccgaacgacctgttcttcgtgaacacgccgttcgcctgc

SEQ ID NO: 454 - protein, 43 aa, Kibdelosporangium sp.
MIKDDEIYEVPTLVEVGDFAELTLGLPWGCPNDLFFVNTPFAC

SEQ ID NO: 455 - DNA, 132 bp, Kibdelosporangium sp.
  CDS (1)..(132)
atgatccatgacgacgagatctacgaggtgccgacgctggtcgaggtcggcgagttcaccgaactgacactgggtatcccgtttgggttcgggtgcccggactacatgcacatgctcacgccgtacgcctgc

SEQ ID NO: 456 - protein, 44 aa, Kibdelosporangium sp.
MIHDDEIYEVPTLVEVGEFTELTLGIPFGFGCPDYMHMLTPYAC

SEQ ID NO: 457 - DNA, 132 bp, Kibdelosporangium sp.; identical to SEQ ID NO: 455
  CDS (1)..(132)

SEQ ID NO: 458 - protein, 44 aa, Kibdelosporangium sp.; identical to SEQ ID NO: 456

SEQ ID NO: 459 - DNA, 129 bp, Kibdelosporangium sp.; identical to SEQ ID NO: 453
  CDS (1)..(129)

SEQ ID NO: 460 - protein, 43 aa, Kibdelosporangium sp.; identical to SEQ ID NO: 454

SEQ ID NO: 461 - DNA, 120 bp, Streptomyces canus
  CDS (1)..(120)
atggccacgtacgacgagtacgagacccccgagctggtcgaggtcggcgagttctccgagctgaccctcggctgggacaaccagtgcgtcgactggttcaatggcggcgcctgggtctgc

SEQ ID NO: 462 - protein, 40 aa, Streptomyces canus
MATYDEYETPELVEVGEFSELTLGWDNQCVDWFNGGAWVC

SEQ ID NO: 463 - DNA, 120 bp, Streptomyces canus
  CDS (1)..(120)
atgaacgaggagacatacgagacgcccgagctcgtcgaggtcggcggcttcgcggagctgaccctgggcgccggtccgacggactgcgtcgactggtggggcggggacgcctggatctgc

SEQ ID NO: 464 - protein, 40 aa, Streptomyces canus
MNEETYETPELVEVGGFAELTLGAGPTDCVDWWGGDAWIC

SEQ ID NO: 465 - DNA, 102 bp, Streptomyces mobaraensis
  CDS (1)..(102)
atgaagccgaccctgttcaagcagggcgacttcaccaagaagacggccggctggttcatgagcaagaagtcggaaaacctgacctggcgcatcggcgggtcg

SEQ ID NO: 466 - protein, 34 aa, Streptomyces mobaraensis
MKPTLFKQGDFTKKTAGWFMSKKSENLTWRIGGS

SEQ ID NO: 467 - DNA, 102 bp, Streptomyces mobaraensis; identical to SEQ ID NO: 465
  CDS (1)..(102)

SEQ ID NO: 468 - protein, 34 aa, Streptomyces mobaraensis; identical to SEQ ID NO: 466

SEQ ID NO: 469 - DNA, 138 bp, Luteimonas sp.
  CDS (1)..(138)
atgaacgcgaacgacaacacccgtgaagccgcggcggacgacgtgatcgtgctgggcatcgccagcatcgagacccagggcatcgacctgggcttcgagccggtcggccggaccccgatggcggggatctctgaagag

SEQ ID NO: 470 - protein, 46 aa, Luteimonas sp.
MNANDNTREAAADDVIVLGIASIETQGIDLGFEPVGRTPMAGISEE

SEQ ID NO: 471 - DNA, 132 bp, Streptomyces sp.
  CDS (1)..(132)
atgaagaagcaggcgcaggaagcgaagaagagctatgcgaagcccgcgatggtcaagcagggcgacttcaccaaggtgacggccggctacttcgtcggctcgtacaaggagtggatcgtccgccgcatcgtc

SEQ ID NO: 472 - protein, 44 aa, Streptomyces sp.
MKKQAQEAKKSYAKPAMVKQGDFTKVTAGYFVGSYKEWIVRRIV

SEQ ID NO: 473 - DNA, 138 bp, Xanthomonas arboricola
  CDS (1)..(138)
atgaacatcaatgacaacgtccacggtaatgcgcaggatgaggtgatcgttcttggggttgcgagtgtggaaacccagggcatcttgcaggggaacgagccgatgggcgggcagcccgtcccgggcatttccgaggag

SEQ ID NO: 474 - protein, 46 aa, Xanthomonas arboricola
MNINDNVHGNAQDEVIVLGVASVETQGILQGNEPMGGQPVPGISEE

SEQ ID NO: 475 - DNA, 135 bp, Stenotrophomonas acidaminiphila
  CDS (1)..(135)
atgaacagcaacgacaacaccggcgtgcacgccgacgaagtgatcgtgctcggcgtcgccagcgtcgagacccagggcatcctgcagggcaacgagccgatgggcggcgagcccgtgccgggtatttccgaagag

SEQ ID NO: 476 - protein, 45 aa, Stenotrophomonas acidaminiphila
MNSNDNTGVHADEVIVLGVASVETQGILQGNEPMGGEPVPGISEE

SEQ ID NO: 477 - DNA, 138 bp, Nocardia sp.
  CDS (1)..(138)
atggagaacacggcagacagctcggacaagaggatctacgagaagccggtgatcgccaaatgcggcgatttccgcaacctcaccgggggcgttttcaccacggaatccgacctgctggtcggacgccgcggaatgatc

SEQ ID NO: 478 - protein, 46 aa, Nocardia sp.
MENTADSSDKRIYEKPVIAKCGDFRNLTGGVFTTESDLLVGRRGMI

SEQ ID NO: 479 - DNA, 138 bp, Xanthomonas cannabis
  CDS (1)..(138)
atggacacgaacaagaacgcccgcacccacgtgcaggatgaagtgatcgagctcggcgtcgccagcgtcgagaccaagggccagatgggaatcaccgagaacttcggtgcggttcccctcgacggcatctccgatgcc

SEQ ID NO: 480 - protein, 46 aa, Xanthomonas cannabis
MDTNKNARTHVQDEVIELGVASVETKGQMGITENFGAVPLDGISDA

SEQ ID NO: 481 - DNA, 141 bp, Luteimonas sp.
  CDS (1)..(141)
atgaacaccaacgacaacacccgcaccgaggtgcaggacgacgtgatcgagctcggcgttgcgagcgtcgagacgcagggcggcgcgttcgaccccggtgaggtgatggggctgaacatcacgccagggatctccgaggag

SEQ ID NO: 482 - protein, 47 aa, Luteimonas sp.
MNTNDNTRTEVQDDVIELGVASVETQGGAFDPGEVMGLNITPGISEE

SEQ ID NO: 483 - DNA, 141 bp, Burkholderia mallei; identical to SEQ ID NO: 47
  CDS (1)..(141)

SEQ ID NO: 484 - protein, 47 aa, Burkholderia mallei; identical to SEQ ID NO: 48

SEQ ID NO: 485 - DNA, 138 bp, Xanthomonas cannabis; identical to SEQ ID NO: 479
  CDS (1)..(138)

SEQ ID NO: 486 - protein, 46 aa, Xanthomonas cannabis; identical to SEQ ID NO: 480

SEQ ID NO: 487 - DNA, 129 bp, Saccharothrix espanaensis
  CDS (1)..(129)
atgacgaagaggacgttgccggagcgataccagacaccgtcggcacaagtggtcggtcgtttcaccagggacacgcgggcgctcgtccacgggctccgggaccaccgcggacgtggacgccacgagagc

SEQ ID NO: 488 - protein, 43 aa, Saccharothrix espanaensis
MTKRTLPERYQTPSAQVVGRFTRDTRALVHGLRDHRGRGRHES

SEQ ID NO: 489 - DNA, 147 bp, Rhodanobacter sp.
  CDS (1)..(147)
atggatacgaacgagaacatctgcagcaatacgcaggacgatgtcatcgagctcggcatcgccagtgtcgagaccaagggtggcagtggcccgatcgaaccgagtggcggacccggcctgccgttgatcccggggatttccgaggag

SEQ ID NO: 490 - protein, 49 aa, Rhodanobacter sp.
MDTNENICSNTQDDVIELGIASVETKGGSGPIEPSGGPGLPLIPGISEE

SEQ ID NO: 491 - DNA, 147 bp, Rhodanobacter denitrificans
  CDS (1)..(147)
atgaacacgaacgagaacatccgcaacgacacgccggaagacgtcatcgtgctcggtgttgccagtgtcgagacgaaaggccccatgggctccaccgaaccggaaggcgggctcggccggccggtgatccccggcatttccgaggag

SEQ ID NO: 492 - protein, 49 aa, Rhodanobacter denitrificans
MNTNENIRNDTPEDVIVLGVASVETKGPMGSTEPEGGLGRPVIPGISEE

SEQ ID NO: 493 - DNA, 144 bp, Rhodanobacter denitrificans
  CDS (1)..(144)
atgaacacgaacgagaacatccgtaccaacgcgccggaagacgtcatcgagctcggcatcgccagcgttgaaaccaagggcgagtttggcgtaaccgaggggggcgggcaaggcaagccgatgattcccggcatttccgaggaa

SEQ ID NO: 494 - protein, 48 aa, Rhodanobacter denitrificans
MNTNENIRTNAPEDVIELGIASVETKGEFGVTEGGGQGKPMIPGISEE

SEQ ID NO: 495 - DNA, 138 bp, Rhodanobacter sp.
  CDS (1)..(138)
atgaacgagaacatccgcaacgacacaccggaagacgtcatcgtgctcggcgtcgccagcgtcgagaccaagggcgatggtatccgaggcgaggttcctgggaccggcgctccgatgattccaggcatttccgaggag

SEQ ID NO: 496 - protein, 46 aa, Rhodanobacter sp.
MNENIRNDTPEDVIVLGVASVETKGDGIRGEVPGTGAPMIPGISEE

SEQ ID NO: 497 - DNA, 135 bp, Streptomyces celluloflavus
  CDS (1)..(135)
atgaccaagaacaagcagcagccggagcgttacgtgccgcccaccgtcgccaaggtcggccacttcagcaaggacacggacggaaccgtctacacgctgaaggacgccacgaccctgggcttcaagaagcccaag

SEQ ID NO: 498 - protein, 45 aa, Streptomyces celluloflavus
MTKNKQQPERYVPPTVAKVGHFSKDTDGTVYTLKDATTLGFKKPK

SEQ ID NO: 499 - DNA, 144 bp, Rhodanobacter sp.
  CDS (1)..(144)
atgaacacgaacgagaacatccgcaacgacacgccggaagaggtcatcgtgctcggtgttgccagtgtcgagaccaaggggcaacaaggcataggcgaggttcctgggaccggcggtccgatgatccccggcatttccgaggag

SEQ ID NO: 500 - protein, 48 aa, Rhodanobacter sp.
MNTNENIRNDTPEEVIVLGVASVETKGQQGIGEVPGTGGPMIPGISEE

SEQ ID NO: 501 - DNA, 117 bp, Rubrivivax benzoatilyticus
  CDS (1)..(117)
atggacgaagagaccgaactggacatcgtcgacctgggcgatgcgaaggacacgaccaagggcatcctgctgccgggcagcgaggacaacgtgacgatgcccggccggcagatcgcc

SEQ ID NO: 502 - protein, 39 aa, Rubrivivax benzoatilyticus
MDEETELDIVDLGDAKDTTKGILLPGSEDNVTMPGRQIA

SEQ ID NO: 503 - DNA, 123 bp, Xylanimonas cellulosilytica
  CDS (1)..(123)
atgcccagctacgctgctccgaagctcacccgcatcggctcgttcaagaccgtgacgaagagccttggcaaggcgccgcacaacgacatcttccggcgccccgcggtcttcgtcatctacctg

SEQ ID NO: 504 - protein, 41 aa, Xylanimonas cellulosilytica
MPSYAAPKLTRIGSFKTVTKSLGKAPHNDIFRRPAVFVIYL

SEQ ID NO: 505 - DNA, 123 bp, Streptomyces flocculus
  CDS (1)..(123)
atggagcacacctacgagccccccgccctcaccgagctcggcgacttcgaggagctgacgcagtgcctgccgtcgggtgactgccccgacttcctgggctgtggtcgcgcgatctggtgcatc

SEQ ID NO: 506 - protein, 41 aa, Streptomyces flocculus
MEHTYEPPALTELGDFEELTQCLPSGDCPDFLGCGRAIWCI

SEQ ID NO: 507 - DNA, 123 bp, Streptomyces sp.
  CDS (1)..(123)
atggagcacacctacgagccccccgccctcaccgagctcggcgacttcggggagctgacgcagtgcctgccgtcgggcgactgccccgacttcctgggctgcggtcgcgcgatctggtgcatc

SEQ ID NO: 508 - protein, 41 aa, Streptomyces sp.
MEHTYEPPALTELGDFGELTQCLPSGDCPDFLGCGRAIWCI

SEQ ID NO: 509 - DNA, 123 bp, Streptomyces flocculus; identical to SEQ ID NO: 505
  CDS (1)..(123)

SEQ ID NO: 510 - protein, 41 aa, Streptomyces flocculus; identical to SEQ ID NO: 506

SEQ ID NO: 511 - DNA, 123 bp, Xylanimonas cellulosilytica; identical to SEQ ID NO: 503
  CDS (1)..(123)

SEQ ID NO: 512 - protein, 41 aa, Xylanimonas cellulosilytica; identical to SEQ ID NO: 504

SEQ ID NO: 513 - DNA, 138 bp, Xanthomonas arboricola; identical to SEQ ID NO: 473
  CDS (1)..(138)

SEQ ID NO: 514 - protein, 46 aa, Xanthomonas arboricola; identical to SEQ ID NO: 474

SEQ ID NO: 515 - DNA, 123 bp, Streptomyces sp.; identical to SEQ ID NO: 507
  CDS (1)..(123)

SEQ ID NO: 516 - protein, 41 aa, Streptomyces sp.; identical to SEQ ID NO: 508

SEQ ID NO: 517 - DNA, 123 bp, Streptomyces sp.; identical to SEQ ID NO: 507
  CDS (1)..(123)

SEQ ID NO: 518 - protein, 41 aa, Streptomyces sp.; identical to SEQ ID NO: 508

SEQ ID NO: 519 - DNA, 144 bp, Rhodanobacter sp.
  CDS (1)..(144)
atgaacacgaacgagaacatccgcaacaacgcttcggaagacgtcatcgtgcttggcgtcgccagcgtcgaaacccagggcggccctggcagcaacgaagcggtcggtttcggcggcccggtgattcccgggatttccgaggag

SEQ ID NO: 520 - protein, 48 aa, Rhodanobacter sp.
MNTNENIRNNASEDVIVLGVASVETQGGPGSNEAVGFGGPVIPGISEE

SEQ ID NO: 521 - DNA, 105 bp, Ideonella sakaiensis
  CDS (1)..(105)
atgcaagtggaagtcgtcgacctgggagacgcgaaggaagtgaccctgggcgtcgagctggccttcaacgaagagctgatcgacgccctgccgcggctctacgac

SEQ ID NO: 522 - protein, 35 aa, Ideonella sakaiensis
MQVEVVDLGDAKEVTLGVELAFNEELIDALPRLYD

SEQ ID NO: 523 - DNA, 123 bp, Streptomyces flocculus; identical to SEQ ID NO: 505
  CDS (1)..(123)

SEQ ID NO: 524 - protein, 41 aa, Streptomyces flocculus; identical to SEQ ID NO: 506

SEQ ID NO: 525 - DNA, 123 bp, Cellulomonas sp.
  CDS (1)..(123)
atgagcacctactccgccccgcagctcacgcgcatcggatcgttcaagtccgtgacgaagagcctcggcaaggcgccgcacaacgacatcttccggcgccccgcgatcttcgtcatctacgtc

SEQ ID NO: 526 - protein, 41 aa, Cellulomonas sp.
MSTYSAPQLTRIGSFKSVTKSLGKAPHNDIFRRPAIFVIYV

SEQ ID NO: 527 - DNA, 132 bp, Sphingopyxis macrogoltabida
  CDS (1)..(132)
atgaacaagagcgaaatcagcatcgtcgatcttggcgatgcgcgcgtcgaaacccgcggcaccggcgaactcggcccgctggacatccagacgttccagcggacgtacaatgccggcattcaggccgacgat

SEQ ID NO: 528 - protein, 44 aa, Sphingopyxis macrogoltabida
MNKSEISIVDLGDARVETRGTGELGPLDIQTFQRTYNAGIQADD

SEQ ID NO: 529 - DNA, 141 bp, Blastomonas sp.
  CDS (1)..(141)
atgaatgcgtttgaaacccagaatgacgacgtcatcgatctcggcgccgtgcaggaagaaacccgcggctcggcgatcgctggcctcgacgacgtccagcccgggctgaagatcttcgtcggcggaatggaccgcgaggat

SEQ ID NO: 530 - protein, 47 aa, Blastomonas sp.
MNAFETQNDDVIDLGAVQEETRGSAIAGLDDVQPGLKIFVGGMDRED

SEQ ID NO: 531 - DNA, 141 bp, Novosphingobium sp.
  CDS (1)..(141)
atgaaagaacgtgaacataacgaaagtgatgtcattgagcttggcattgctcatatcgagaccaggggcaatgctctattcggccgtgatgacacccagaccggtatgaagtacggggtcgcgggaatttcatccgaagac

SEQ ID NO: 532 - protein, 47 aa, Novosphingobium sp.
MKEREHNESDVIELGIAHIETRGNALFGRDDTQTGMKYGVAGISSED

SEQ ID NO: 533 - DNA, 132 bp, Sphingopyxis macrogoltabida
  CDS (1)..(132)
atgaacaagagtgaaaacagcatcgtcgatcttggcgatgcccgtgtcgaaacccgcggcaccggcgaactcggcccgctggacatccagacgttccagcggacgtacaacgccggcatccagaccgacgat

SEQ ID NO: 534 - protein, 44 aa, Sphingopyxis macrogoltabida
MNKSENSIVDLGDARVETRGTGELGPLDIQTFQRTYNAGIQTDD

SEQ ID NO: 535 - DNA, 117 bp, Streptomyces sp.
  CDS (1)..(117)
atggagaacacgtacgaggctccggcgctcgtcgaggtcggcgacttcaccgaggtcaccctcggcgacggcacctggggcttcgacagcaagcgtcagtgcgcctggctcggctgc

SEQ ID NO: 536 - protein, 39 aa, Streptomyces sp.
MENTYEAPALVEVGDFTEVTLGDGTWGFDSKRQCAWLGC

SEQ ID NO: 537 - DNA, 138 bp, Xanthomonas arboricola; identical to SEQ ID NO: 473
  CDS (1)..(138)

SEQ ID NO: 538 - protein, 46 aa, Xanthomonas arboricola; identical to SEQ ID NO: 474

SEQ ID NO: 539 - DNA, 129 bp, Sphingopyxis sp.
  CDS (1)..(129)
atgaaaacgcatgacgacatcatcgatctcggcgccgcccaggacgaaaccctcggcgcgctgccgtcgggccagcaggacgtacagcccggggacaagtttatcctcggcggcatcagcgccgacgat

SEQ ID NO: 540 - protein, 43 aa, Sphingopyxis sp.
MKTHDDIIDLGAAQDETLGALPSGQQDVQPGDKFILGGISADD

SEQ ID NO: 541 - DNA, 93 bp, Streptomyces sp.
  CDS (1)..(93)
atgccgctgatcgtggaggtcggagatttccgtgagctgacccgttctgttcgccctggccactggatcgacttcttcggtggttggtggctg

SEQ ID NO: 542 - protein, 31 aa, Streptomyces sp.
MPLIVEVGDFRELTRSVRPGHWIDFFGGWWL

SEQ ID NO: 543 - DNA, 117 bp, Streptomyces avermitilis
  CDS (1)..(117)
atgaccgcagagacctcgtacgagacgcccatactcactgagatcggtgacttcgccgacgtcacccgcgccacctaccgcggcttctgggtggatttcctcggcggctggtggttc

SEQ ID NO: 544 - protein, 39 aa, Streptomyces avermitilis
MTAETSYETPILTEIGDFADVTRATYRGFWVDFLGGWWF

SEQ ID NO: 545 - DNA, 117 bp, Streptomyces avermitilis; identical to SEQ ID NO: 543
  CDS (1)..(117)

SEQ ID NO: 546 - protein, 39 aa, Streptomyces avermitilis; identical to SEQ ID NO: 544

SEQ ID NO: 547 - DNA, 129 bp, Caulobacter sp.
  CDS (1)..(129)
atgcggcaggtcgaaaaccaaaccgaagagctggtcgagctggggcgcgccagcgacgagacccaaggtccggacatgccgacctcggaggtcggcatcggccgtgcgcccttcggcatcaccgaagac

SEQ ID NO: 548 - protein, 43 aa, Caulobacter sp.
MRQVENQTEELVELGRASDETQGPDMPTSEVGIGRAPFGITED

SEQ ID NO: 549 - DNA, 129 bp, Caulobacter sp.
  CDS (1)..(129)
atggaacggaccgaacaccgcatcgacgacctgatcgaactgggcgcggccagcgtcgagaccaagggcgccgatctgccgacctcggaagtcggcatcggccggcagccggccggcatcaccgaggac

SEQ ID NO: 550 - protein, 43 aa, Caulobacter sp.
MERTEHRIDDLIELGAASVETKGADLPTSEVGIGRQPAGITED

SEQ ID NO: 551 - DNA, 135 bp, Novosphingobium resinovorum
  CDS (1)..(135)
atggatcgcatagaagtggaagacaaggaagtcatcgaactcggcacggcctcggaggcgacgaaaggcgaagcgctgatcgatcaggatccgggcgtcggtcgcctgaccttcctttccggcatcgttgccgac

SEQ ID NO: 552 - protein, 45 aa, Novosphingobium resinovorum
MDRIEVEDKEVIELGTASEATKGEALIDQDPGVGRLTFLSGIVAD

SEQ ID NO: 553 - DNA, 132 bp, Sphingopyxis sp.
  CDS (1)..(132)
atggacaagcgtgaaaccggtatcgtcgatctgggcgatgcgcgcaccgaaacccgcgggctcggcgtcgaaggtccgatcgaccttgcgactctccagcggacctacaacgacggcatccaggccgacgac

SEQ ID NO: 554 - protein, 44 aa, Sphingopyxis sp.
MDKRETGIVDLGDARTETRGLGVEGPIDLATLQRTYNDGIQADD

SEQ ID NO: 555 - DNA, 132 bp, Sphingopyxis fribergensis
  CDS (1)..(132)
atggacaagcatgaaaacggcatcgtcgacctgggcgatgcgcgcatcgaaacccgcgggtcgggaggcaacggcgacatcgacctccagacgttccagcgctacgtcgcgggcggcatcgagaccgacgac

SEQ ID NO: 556 - protein, 44 aa, Sphingopyxis fribergensis
MDKHENGIVDLGDARIETRGSGGNGDIDLQTFQRYVAGGIETDD

SEQ ID NO: 557 - DNA, 129 bp, Streptomyces violaceusniger
gtgaacacggaaaagctggagtacgagccgcccgtgctggccgaggtcggcgacttcgccgagctgacccgggtcacctgctgcggcaggtggatcgacaacatctgggtctccgcctggttcgacttc

SEQ ID NO: 558 - protein, 43 aa, Streptomyces violaceusniger
MNTEKLEYEPPVLAEVGDFAELTRVTCCGRWIDNIWVSAWFDF

SEQ ID NO: 559 - DNA, 129 bp, Streptomyces violaceusniger
  CDS (1)..(129)
atggtcacagagcaatgggaatacgagccgccgattctggtcgaggtcggcgacttcgccgtcctcacccgtttgggctgctgcggccggtggctcgacaacatgttcatcacggggtggttcgacatc

SEQ ID NO: 560 - protein, 43 aa, Streptomyces violaceusniger
MVTEQWEYEPPILVEVGDFAVLTRLGCCGRWLDNMFITGWFDI

SEQ ID NO: 561 - DNA, 129 bp, Streptomyces violaceusniger; identical to SEQ ID NO: 557

SEQ ID NO: 562 - protein, 43 aa, Streptomyces violaceusniger; identical to SEQ ID NO: 558

SEQ ID NO: 563 - DNA, 129 bp, Streptomyces violaceusniger; identical to SEQ ID NO: 559
  CDS (1)..(129)

SEQ ID NO: 564 - protein, 43 aa, Streptomyces violaceusniger; identical to SEQ ID NO: 560

SEQ ID NO: 565 - DNA, 114 bp, Ideonella sakaiensis
  CDS (1)..(114)
atggatgaactggacgtggacatcgtcgagctgggcgatgcgaaggaagtgacccagggccaggtcggcggcttcaaccaggagctggccgacgagctgccgcgcgtctggaac

SEQ ID NO: 566 - protein, 38 aa, Ideonella sakaiensis
MDELDVDIVELGDAKEVTQGQVGGFNQELADELPRVWN

SEQ ID NO: 567 - DNA, 129 bp, Nocardiopsis halophila
  CDS (1)..(129)
atgaagaagtacaccactccggccctcacccggatcggctccttcaggaagctcacgaagtcgctgggccgccttccctgcaatgacatcttcggccagaaggccctgtggaccacctccccgaactgc

SEQ ID NO: 568 - protein, 43 aa, Nocardiopsis halophila
MKKYTTPALTRIGSFRKLTKSLGRLPCNDIFGQKALWTTSPNC

SEQ ID NO: 569 - DNA, 108 bp, Streptomyces avermitilis
  CDS (1)..(108)
atgaagaaggcttacgaggctccgacgctggtccggctcggaacgttccggaagaagaccgggctcttggggcgctccggcaacgaccgtctcatcctgagcaagaac

SEQ ID NO: 570 - protein, 36 aa, Streptomyces avermitilis
MKKAYEAPTLVRLGTFRKKTGLLGRSGNDRLILSKN

SEQ ID NO: 571 - DNA, 108 bp, Streptomyces avermitilis; identical to SEQ ID NO: 569
  CDS (1)..(108)

SEQ ID NO: 572 - protein, 36 aa, Streptomyces avermitilis; identical to SEQ ID NO: 570

SEQ ID NO: 573 - DNA, 108 bp, Streptomyces decoyicus
  CDS (1)..(108)
atgaagaaggcttacgaggcgccgacactggtccggctcgggacgttccggaagaagaccgggctcttgcagagctccggcaacgaccgtctcatcctgagcaagaac

SEQ ID NO: 574 - protein, 36 aa, Streptomyces decoyicus
MKKAYEAPTLVRLGTFRKKTGLLQSSGNDRLILSKN

SEQ ID NO: 575 - DNA, 108 bp, Streptomyces decoyicus; identical to SEQ ID NO: 573
  CDS (1)..(108)

SEQ ID NO: 576 - protein, 36 aa, Streptomyces decoyicus; identical to SEQ ID NO: 574

SEQ ID NO: 577 - DNA, 117 bp, Amycolatopsis nigrescens
  CDS (1)..(117)
atgacgaagcgtacctatgagactccggtcctggtgagcgctggttccttcgcgcgtcggaccggttccggcagcccgaaggcggcccgtgacccgttcggccgcaggtggctgccg

SEQ ID NO: 578 - protein, 39 aa, Amycolatopsis nigrescens
MTKRTYETPVLVSAGSFARRTGSGSPKAARDPFGRRWLP

SEQ ID NO: 579 - DNA, 132 bp, Sphingopyxis sp.; identical to SEQ ID NO: 553
  CDS (1)..(132)

SEQ ID NO: 580 - protein, 44 aa, Sphingopyxis sp.; identical to SEQ ID NO: 554

SEQ ID NO: 581 - DNA, 108 bp, Streptomyces lydicus
  CDS (1)..(108)
atgaagaaggcttacgaagcacctaccctcgtccggctggggacgttccggaagaagaccggactcctcaacagctccggaaacgaccgtctgatcctgagcaagaac

SEQ ID NO: 582 - protein, 36 aa, Streptomyces lydicus
MKKAYEAPTLVRLGTFRKKTGLLNSSGNDRLILSKN

SEQ ID NO: 583 - DNA, 108 bp, Streptomyces sp.
  CDS (1)..(108)
atgaagaaggcatacgaagcaccgaccctcgtccggctggggacgttccggaagaagaccggactcctcagcagctccggaaacgaccggctgatcctgagcaagaac

SEQ ID NO: 584 - protein, 36 aa, Streptomyces sp.
MKKAYEAPTLVRLGTFRKKTGLLSSSGNDRLILSKN

SEQ ID NO: 585 - DNA, 105 bp, Amycolatopsis orientalis
  CDS (1)..(105)
atgaaggaatacgagacccccatgctgatcgaggccggcgagttcggtgaggtcaccggcctgctgcagtcgtcgggcaacgaccggctgatcttcagcaagaac

SEQ ID NO: 586 - protein, 35 aa, Amycolatopsis orientalis
MKEYETPMLIEAGEFGEVTGLLQSSGNDRLIFSKN

SEQ ID NO: 587 - DNA, 117 bp, Amycolatopsis nigrescens; identical to SEQ ID NO: 577
  CDS (1)..(117)

SEQ ID NO: 588 - protein, 39 aa, Amycolatopsis nigrescens; identical to SEQ ID NO: 578

SEQ ID NO: 589 - DNA, 108 bp, Streptomyces galbus
  CDS (1)..(108)
atgaagaaggcttacgaagcaccgacgctggtccgcctcgggacgttccggaagaagaccgggttcttgcagagctccggcaacgaccgtctcatcctgagcaagaac

SEQ ID NO: 590 - protein, 36 aa, Streptomyces galbus
MKKAYEAPTLVRLGTFRKKTGFLQSSGNDRLILSKN

SEQ ID NO: 591 - DNA, 111 bp, Streptomyces chartreusis
  CDS (1)..(111)
atgcgcacctacgagcgtccgacgctgactgcggtcggctccttccgcaagaccggtctgggcttcagggacgggccggagaggttctggttcttccggaggaggttcttc

SEQ ID NO: 592 - protein, 37 aa, Streptomyces chartreusis
MRTYERPTLTAVGSFRKTGLGFRDGPERFWFFRRRFF

SEQ ID NO: 593 - DNA, 108 bp, Streptomyces katrae
  CDS (1)..(108)
atgaagaaggcgtacgaagctccgacgctcgcgcgactgggttccttcaggaagaagaccgggctgctgggtcgctccggcaatgaccgcctggtcctcagcaagaac

SEQ ID NO: 594 - protein, 36 aa, Streptomyces katrae
MKKAYEAPTLARLGSFRKKTGLLGRSGNDRLVLSKN

SEQ ID NO: 595 - DNA, 108 bp, Streptomyces lydicus
  CDS (1)..(108)
atgaagaaggcgtacgaagccccgaccctcgtccggctcggcacgttccgtcagcggaccgggctcctgcaggcgcacggcaacgaccgtctgatcttcagcaagaac

SEQ ID NO: 596 - protein, 36 aa, Streptomyces lydicus
MKKAYEAPTLVRLGTFRQRTGLLQAHGNDRLIFSKN

SEQ ID NO: 597 - DNA, 102 bp, Streptomyces aureocirculatus
  CDS (1)..(102)
atggtggaagtcggcgacttcaccgagctgacccggggtgaggcgcttggcgcgcactacgagggcggcttccctccctacgagtggtacctcggccccaac

SEQ ID NO: 598 - protein, 34 aa, Streptomyces aureocirculatus
MVEVGDFTELTRGEALGAHYEGGFPPYEWYLGPN

SEQ ID NO: 599 - DNA, 108 bp, Streptomyces lydicus; identical to SEQ ID NO: 595
  CDS (1)..(108)

SEQ ID NO: 600 - protein, 36 aa, Streptomyces lydicus; identical to SEQ ID NO: 596

SEQ ID NO: 601 - DNA, 108 bp, Streptomyces aurantiacus
  CDS (1)..(108)
atgaagaaggcgtacgaagccccgaccctcgtccggctcgggacgttccgtcagcggaccggtctcttgcagcgccacggcaacgaccgtctgatcttcagcaagaac

SEQ ID NO: 602 - protein, 36 aa, Streptomyces aurantiacus
MKKAYEAPTLVRLGTFRQRTGLLQRHGNDRLIFSKN

SEQ ID NO: 603 - DNA, 108 bp, Streptomyces aurantiacus; identical to SEQ ID NO: 601
  CDS (1)..(108)

SEQ ID NO: 604 - protein, 36 aa, Streptomyces aurantiacus; identical to SEQ ID NO: 602

SEQ ID NO: 605 - DNA, 108 bp, Streptomyces sp.
  CDS (1)..(108)
atgaagaagacctacgaagcaccgaccctcgtccggctggggacgttccggaagaagaccgggctcctgggcaactccggaaacgaccgtctgctcctgagcaagaac

SEQ ID NO: 606 - protein, 36 aa, Streptomyces sp.
MKKTYEAPTLVRLGTFRKKTGLLGNSGNDRLLLSKN

SEQ ID NO: 607 - DNA, 108 bp, Streptomyces chattanoogensis
  CDS (1)..(108)
atgaagaaggcatacgaagccccgaccctcgtccggctcggcacgttccgtcagcggaccgggctcctgtcgaagcacggcaacgaccgtgtgatcttcagcaagaac

SEQ ID NO: 608 - protein, 36 aa, Streptomyces chattanoogensis
MKKAYEAPTLVRLGTFRQRTGLLSKHGNDRVIFSKN

SEQ ID NO: 609 - DNA, 138 bp, Nocardiopsis alba
  CDS (1)..(138)
atggacgaagaaaagatcggcaacgaaatctccgcctacgagactccgaccgtcaccgagatgggcgcgttctccgaggtcaccctcggccgccccaactggggattcgagaacgactggtcctgcgtccgggtctgc

SEQ ID NO: 610 - protein, 46 aa, Nocardiopsis alba
MDEEKIGNEISAYETPTVTEMGAFSEVTLGRPNWGFENDWSCVRVC

SEQ ID NO: 611 - DNA, 138 bp, Nocardiopsis alba; identical to SEQ ID NO: 609
  CDS (1)..(138)

SEQ ID NO: 612 - protein, 46 aa, Nocardiopsis alba; identical to SEQ ID NO: 610

SEQ ID NO: 613 - DNA, 117 bp, Sphingobium barthaii; identical to SEQ ID NO: 207
  CDS (1)..(117)

SEQ ID NO: 614 - protein, 39 aa, Sphingobium barthaii; identical to SEQ ID NO: 208

SEQ ID NO: 615 - DNA, 138 bp, Nocardiopsis alba; identical to SEQ ID NO: 609
  CDS (1)..(138)

SEQ ID NO: 616 - protein, 46 aa, Nocardiopsis alba; identical to SEQ ID NO: 610

SEQ ID NO: 617 - DNA, 123 bp, Actinomadura oligospora
  CDS (1)..(123)
atgctctacacaccgcccgaactgactcgactcggcaacttcacgcaggtcaccctcggccacccgagctggggttgggagtgggacagcaagtgcttctggctcaactgcgtgggcaagaac

SEQ ID NO: 618 - protein, 41 aa, Actinomadura oligospora
MLYTPPELTRLGNFTQVTLGHPSWGWEWDSKCFWLNCVGKN

SEQ ID NO: 619 - DNA, 108 bp, Streptomyces sp.
  CDS (1)..(108)
atgaagaaggcctacgaggcaccgacgctcgtccggctcggcaccttccggaaggagaccgggctcctcggagacgccggcaacgaccggctgatcctgagcaagaac

SEQ ID NO: 620 - protein, 36 aa, Streptomyces sp.
MKKAYEAPTLVRLGTFRKETGLLGDAGNDRLILSKN

SEQ ID NO: 621 - DNA, 99 bp, Nocardia sp.
  CDS (1)..(99)
atgtacgagactccgcagctgatcgacctcggcaccttcgacgagcagaccggcctgctcgggttctccggcaacgaccggctgatcctcagcaagaac

SEQ ID NO: 622 - protein, 33 aa, Nocardia sp.
MYETPQLIDLGTFDEQTGLLGFSGNDRLILSKN

SEQ ID NO: 623 - DNA, 180 bp, Kibdelosporangium aridum
  CDS (1)..(180)
atgccaacagtctgcggggctggatatggctgtgcacgtacacggatcgatgcggtgaaaggaggtgcgagtatccgtacttacgagcgtccaacgctgatgaggatgggctcgttcgcccggctgaccggcctgggcgggcgtggcccgcgtgaccttctgttccggcaccagctcctt

SEQ ID NO: 624 - protein, 60 aa, Kibdelosporangium aridum
MPTVCGAGYGCARTRIDAVKGGASIRTYERPTLMRMGSFARLTGLGGRGPRDLLFRHQLL

SEQ ID NO: 625 - DNA, 108 bp, Streptomyces davawensis
  CDS (1)..(108)
atgaagaaggtctacgaggcgccgacgctggtgcgactgggttcgttccggaagcagacggggctgctggggcgctcgggcaacgaccggctgatcctcagcaagaac

SEQ ID NO: 626 - protein, 36 aa, Streptomyces davawensis
MKKVYEAPTLVRLGSFRKQTGLLGRSGNDRLILSKN

SEQ ID NO: 627 - DNA, 108 bp, Streptomyces xinghaiensis
  CDS (1)..(108)
atgcgcaaggcttacgaggcgccggtgctggtcgaactgggcgggttccgggagaagacggggctgctggggcgccacggcaacgaccgtctgatcctcagcaagaac

SEQ ID NO: 628 - protein, 36 aa, Streptomyces xinghaiensis
MRKAYEAPVLVELGGFREKTGLLGRHGNDRLILSKN

SEQ ID NO: 629 - DNA, 141 bp, Streptomyces sp.
  CDS (1)..(141)
atgcccgagatccaggaacagaccgagacggtggagtacgaagcgccggagctggccgaggccggtgagttcgccgagctgacgctcgggttccacggccaccactgggacgccttcggaggccgcggccacggctggtgg

SEQ ID NO: 630 - protein, 47 aa, Streptomyces sp.
MPEIQEQTETVEYEAPELAEAGEFAELTLGFHGHHWDAFGGRGHGWW

SEQ ID NO: 631 - DNA, 108 bp, Streptomyces pristinaespiralis
gtgaagaaggcttacgaggcgccgacgctggttcggctgggatcgttccgaacgaagaccgggcttcttgggaagcacggcaacgaccgtctcatcctgagcaagaac

SEQ ID NO: 632 - protein, 36 aa, Streptomyces pristinaespiralis
MKKAYEAPTLVRLGSFRTKTGLLGKHGNDRLILSKN

SEQ ID NO: 633 - DNA, 108 bp, Streptomyces pristinaespiralis; identical to SEQ ID NO: 631

SEQ ID NO: 634 - protein, 36 aa, Streptomyces pristinaespiralis; identical to SEQ ID NO: 632

SEQ ID NO: 635 - DNA, 108 bp, Streptomyces auratus
  CDS (1)..(108)
atgaagaaggcttacgaagcgccgacgctcgtccgactgggttcgttccggaagaagaccgggctcctgaacagttccgggaacgaccggctgatcctgagcaagaac

SEQ ID NO: 636 - protein, 36 aa, Streptomyces auratus
MKKAYEAPTLVRLGSFRKKTGLLNSSGNDRLILSKN

SEQ ID NO: 637 - DNA, 117 bp, Streptomyces albulus
  CDS (1)..(117)
atggccaagaaggtctatgaggttccggcgctgttcaaggccggccagttcgccaaggacaccggattcctgaagcgcggaccgcacgagcccaaggtccgtctgccgctgggctgg

SEQ ID NO: 638 - protein, 39 aa, Streptomyces albulus
MAKKVYEVPALFKAGQFAKDTGFLKRGPHEPKVRLPLGW

SEQ ID NO: 639 - DNA, 114 bp, Ideonella sakaiensis; identical to SEQ ID NO: 565
  CDS (1)..(114)

SEQ ID NO: 640 - protein, 38 aa, Ideonella sakaiensis; identical to SEQ ID NO: 566

SEQ ID NO: 641 - DNA, 123 bp, Kibdelosporangium phytohabitans
  CDS (1)..(123)
atgcagacgaagtcggcagagtacgtcaaaccggttctgcgtcaggttggtggtttcgccacgctgacccgcggactcctcgggaggcgcagggattcccgtaaccgcttgcgccctcaggcc

SEQ ID NO: 642 - protein, 41 aa, Kibdelosporangium phytohabitans
MQTKSAEYVKPVLRQVGGFATLTRGLLGRRRDSRNRLRPQA

SEQ ID NO: 643 - DNA, 111 bp, Nocardiopsis potens
  CDS (1)..(111)
atggaggtgtacgagccgccggagttcattgaaatcggtgacttcgctgagctcacccgtctgacccgcgacgggaactgggtggacagcccgggctggggctggtggctc

SEQ ID NO: 644 - protein, 37 aa, Nocardiopsis potens
MEVYEPPEFIEIGDFAELTRLTRDGNWVDSPGWGWWL

SEQ ID NO: 645 - DNA, 108 bp, Streptomyces pactum
  CDS (1)..(108)
atgaagaaggcgtacgaggccccgacgctcgtccggctggggtcgttccggcagaagaccgggctgctgcagcgcaacggcaacgaccgtctgatcctcagcaagaac

SEQ ID NO: 646 - protein, 36 aa, Streptomyces pactum
MKKAYEAPTLVRLGSFRQKTGLLQRNGNDRLILSKN

SEQ ID NO: 647 - DNA, 108 bp, Streptomyces auratus; identical to SEQ ID NO: 635
  CDS (1)..(108)

SEQ ID NO: 648 - protein, 36 aa, Streptomyces auratus; identical to SEQ ID NO: 636

SEQ ID NO: 649 - DNA, 111 bp, Streptomyces viridochromogenes
  CDS (1)..(111)
atgcgcacctacgagcgtccgacgctgactgcggtcggctccttccgcaagaccggtctgggcttcaaggacggaccggaacgtttctggttcttccggaggaagttcttc

SEQ ID NO: 650 - protein, 37 aa, Streptomyces viridochromogenes
MRTYERPTLTAVGSFRKTGLGFKDGPERFWFFRRKFF

SEQ ID NO: 651 - DNA, 108 bp, Streptomyces sp.
  CDS (1)..(108)
atgaagaaggcctacgaagcgccgggactcgtccggctcgggacgttccggaagaagaccgggctgctgcggcgctccggcaacgaccgactcatcctgagcaagaac

SEQ ID NO: 652 - protein, 36 aa, Streptomyces sp.
MKKAYEAPGLVRLGTFRKKTGLLRRSGNDRLILSKN

SEQ ID NO: 653 - DNA, 108 bp, Streptomyces aureocirculatus
  CDS (1)..(108)
atgaagaaggtttacgaagcgccggcactcgtccggctcgggacgttccgcaagaagaccgggcttctgcagcggcacggcaatgaccggctcatcctgagcaagaac

SEQ ID NO: 654 - protein, 36 aa, Streptomyces aureocirculatus
MKKVYEAPALVRLGTFRKKTGLLQRHGNDRLILSKN

SEQ ID NO: 655 - DNA, 108 bp, Streptomyces natalensis
  CDS (1)..(108)
atgaagaaggcatacgaggccccgaccctggtgcggcgcggagacttccggaccgagaccgggctgcttgagttccgcggcaacgaccggctcatcctcagcaagaac

SEQ ID NO: 656 - protein, 36 aa, Streptomyces natalensis
MKKAYEAPTLVRRGDFRTETGLLEFRGNDRLILSKN

SEQ ID NO: 657 - DNA, 141 bp, Streptomyces monomycini
  CDS (1)..(141)
atgcaggacgtacaggaacgtgccgaggcgaccgagtacgaggcgccggagctggccgaggctggtcgcttcaccgagcggacactggggttcaccggtgaacactccgacaactggggcgggatgcacagcaccttctgg

SEQ ID NO: 658 - protein, 47 aa, Streptomyces monomycini
MQDVQERAEATEYEAPELAEAGRFTERTLGFTGEHSDNWGGMHSTFW

SEQ ID NO: 659 - DNA, 108 bp, Streptomyces griseus
  CDS (1)..(108)
atgaagaaggcttacgaggcaccgacgctcgtccggctcggaacgttccgcaaggagacgggactcctcggtcgcgccggcaacgaccggctgatcctgagcaagaac

SEQ ID NO: 660 - protein, 36 aa, Streptomyces griseus
MKKAYEAPTLVRLGTFRKETGLLGRAGNDRLILSKN

SEQ ID NO: 661 - DNA, 117 bp, Streptomyces flavotricini
  CDS (1)..(117)
atggccaagaaggtctacgaggttccggcgctttccaaggccggcgacttccgcaaggacaccggcttcctgaagcgcgggccgcacgagcccaaggtccgtctgcctctgggctgg

SEQ ID NO: 662 - protein, 39 aa, Streptomyces flavotricini
MAKKVYEVPALSKAGDFRKDTGFLKRGPHEPKVRLPLGW

SEQ ID NO: 663 - DNA, 141 bp, Streptomyces rimosus
  CDS (1)..(141)
atgcgggaagcgccggaagtggacgagacgaccgagtacgaaccgcccgagctggccgacgccggggacttcgccgagcggacgctcggctacaccggcgaactgtccgacagctggggcggtatgcacagcaccttctgg

SEQ ID NO: 664 - protein, 47 aa, Streptomyces rimosus
MREAPEVDETTEYEPPELADAGDFAERTLGYTGELSDSWGGMHSTFW

SEQ ID NO: 665 - DNA, 135 bp, Streptomyces sp.
  CDS (1)..(135)
atgggtgagcacactgaggttctgtacgtgccgccggcgctggaggaaatcggggacttcgccaaggagacccgcggcggcaccggcgatcttcaagaaccgtttatcggccgcttcaactttcctcagcaacct

SEQ ID NO: 666 - protein, 45 aa, Streptomyces sp.
MGEHTEVLYVPPALEEIGDFAKETRGGTGDLQEPFIGRFNFPQQP

SEQ ID NO: 667 - DNA, 120 bp, Streptomyces olivaceus
  CDS (1)..(120)
atggccaaggaagacgtgtacgaggttcccgccctgatcgaggtcggcgacttcgccgagctcacccagctgacgtcccagggctactggatcgacagcccgtggggcgcctggtggctc

SEQ ID NO: 668 - protein, 40 aa, Streptomyces olivaceus
MAKEDVYEVPALIEVGDFAELTQLTSQGYWIDSPWGAWWL

SEQ ID NO: 669 - DNA, 168 bp, Kutzneria albida
  CDS (1)..(168)
atgtggacttcgggtgcggagccgcgcccgggaggaagaagaggaggacacgtggaagcacaggacctctacgaaccacccgcggtggtggagatcggcgactacgccgagctgacgatgggcggggtcggcaccgtcttcgacacctggggcctcacgcccatcccg

SEQ ID NO: 670 - protein, 56 aa, Kutzneria albida
MWTSGAEPRPGGRRGGHVEAQDLYEPPAVVEIGDYAELTMGGVGTVFDTWGLTPIP

SEQ ID NO: 671 - DNA, 117 bp, Streptomyces flavidovirens
  CDS (1)..(117)
atgcgcacctacgagcgtccgaccctgactccgatgggttcgttcgggaaggtgaccggcggacgagtcaagaggacaggccctcctgacattctccaccgccaccgcctggtcggc

SEQ ID NO: 672 - protein, 39 aa, Streptomyces flavidovirens
MRTYERPTLTPMGSFGKVTGGRVKRTGPPDILHRHRLVG

SEQ ID NO: 673 - DNA, 117 bp, Streptomyces flavotricini; identical to SEQ ID NO: 661
  CDS (1)..(117)

SEQ ID NO: 674 - protein, 39 aa, Streptomyces flavotricini; identical to SEQ ID NO: 662

SEQ ID NO: 675 - DNA, 120 bp, Streptomyces olivaceus; identical to SEQ ID NO: 667
  CDS (1)..(120)

SEQ ID NO: 676 - protein, 40 aa, Streptomyces olivaceus; identical to SEQ ID NO: 668

SEQ ID NO: 677 - DNA, 105 bp, Spirillospora albida
  CDS (1)..(105)
atgaagcagtacgaaacacccgtcctcgtgccggtcggctccttccggaaggtcaccgggcttctgcagaagcacggcaacgaccgcctgatcctcagcaagaac

SEQ ID NO: 678 - protein, 35 aa, Spirillospora albida
MKQYETPVLVPVGSFRKVTGLLQKHGNDRLILSKN

SEQ ID NO: 679 - DNA, 108 bp, Streptomyces sp.
  CDS (1)..(108)
atgaagaagacatacgaagcaccgacgctgatccggatcggagcgttccggaagaagaccgggttcctgatgcgcgccggcaacgaccggctcatcctgagcaagaac

SEQ ID NO: 680 - protein, 36 aa, Streptomyces sp.
MKKTYEAPTLIRIGAFRKKTGFLMRAGNDRLILSKN

SEQ ID NO: 681 - DNA, 111 bp, Streptomyces sp.
  CDS (1)..(111)
atgcgcacctacgagcgtccgacgctgactgcggtcggctccttccgcaagaccggtctgggcttcagggcagggccggagaggttctggttcttccggaggaggttcttc

SEQ ID NO: 682 - protein, 37 aa, Streptomyces sp.
MRTYERPTLTAVGSFRKTGLGFRAGPERFWFFRRRFF

SEQ ID NO: 683 - DNA, 114 bp, Streptomyces iranensis
  CDS (1)..(114)
atggacgcgattcgctacgaggcacccgcgctgttcgagatcggtggattctccgagaagacccgctgggtcagggtcgggtgggtcccggacctcctcagcacgttcggcggc

SEQ ID NO: 684 - protein, 38 aa, Streptomyces iranensis
MDAIRYEAPALFEIGGFSEKTRWVRVGWVPDLLSTFGG

SEQ ID NO: 685 - DNA, 114 bp, Streptomyces iranensis
  CDS (1)..(114)
atggacacgactcgttacgaggcacccgcgctgttcgagatcggtggattctccgagaagacccgctgggtcagcatgggatggcttccggatctcttcaccacgttcggcggc

SEQ ID NO: 686 - protein, 38 aa, Streptomyces iranensis
MDTTRYEAPALFEIGGFSEKTRWVSMGWLPDLFTTFGG

SEQ ID NO: 687 - DNA, 105 bp, Amycolatopsis lurida
  CDS (1)..(105)
atgaaggaatacgagacccccatgttgatcgacgccggcgagttcgaagaggtcaccggcctgctcgccaggcacggcaacgaccggctgatcttcagcaagaac

SEQ ID NO: 688 - protein, 35 aa, Amycolatopsis lurida
MKEYETPMLIDAGEFEEVTGLLARHGNDRLIFSKN

SEQ ID NO: 689 - DNA, 141 bp, Streptomyces rimosus
  CDS (1)..(141)
atgcgggaagcgccggaagcgaacgagacggccgagtacgaaccacccgagctggccgaggccggtgctttcgccgagcggacgctcggcttcaccggtgaactctccgacagctggggcggccagcacagcaccttctgg

SEQ ID NO: 690 - protein, 47 aa, Streptomyces rimosus
MREAPEANETAEYEPPELAEAGAFAERTLGFTGELSDSWGGQHSTFW

SEQ ID NO: 691 - DNA, 135 bp, Streptomyces sp.; identical to SEQ ID NO: 665
  CDS (1)..(135)

SEQ ID NO: 692 - protein, 45 aa, Streptomyces sp.; identical to SEQ ID NO: 666

SEQ ID NO: 693 - DNA, 141 bp, Streptomyces rimosus; identical to SEQ ID NO: 689
  CDS (1)..(141)

SEQ ID NO: 694 - protein, 47 aa, Streptomyces rimosus; identical to SEQ ID NO: 690

SEQ ID NO: 695 - DNA, 108 bp, Streptomyces sp.
  CDS (1)..(108)
atgaagaaggcatatgaagcgccgacgctcgtccggctcggaacgttccgcaaggagacggggctcctgggacgccacggcaacgaccgtctgatcctgagcaagaac

SEQ ID NO: 696 - protein, 36 aa, Streptomyces sp.
MKKAYEAPTLVRLGTFRKETGLLGRHGNDRLILSKN

SEQ ID NO: 697 - DNA, 117 bp, Streptomyces ipomoeae
  CDS (1)..(117)
atggccaggaaggtctacgaggttccggcgctgtccaaggccggcgacttccgcaaggacaccggattcctgaagcgcgggccgcacgagcccaaggtccgtctgcctctgggcctg

SEQ ID NO: 698 - protein, 39 aa, Streptomyces ipomoeae
MARKVYEVPALSKAGDFRKDTGFLKRGPHEPKVRLPLGL

SEQ ID NO: 699 - DNA, 108 bp, Streptomyces sp.
  CDS (1)..(108)
atgaagaaggcatacgaggcgccgacgctcgtccggctcggtacgttccggaaggagacggggctcctccagcgctccggcaacgaccggctgatcctgagcaagaac

SEQ ID NO: 700 - protein, 36 aa, Streptomyces sp.
MKKAYEAPTLVRLGTFRKETGLLQRSGNDRLILSKN

SEQ ID NO: 701 - DNA, 141 bp, Streptomyces rimosus; identical to SEQ ID NO: 689
  CDS (1)..(141)

SEQ ID NO: 702 - protein, 47 aa, Streptomyces rimosus; identical to SEQ ID NO: 690

SEQ ID NO: 703 - DNA, 108 bp, Streptomyces leeuwenhoekii
  CDS (1)..(108)
atgaagaaggcgtacgaggcccccaccctcgtccggctggggtcgttccgccggaagaccgggctgctgcagcgcagcggcaacgaccgtctgatcctcagcaagaac

SEQ ID NO: 704 - protein, 36 aa, Streptomyces leeuwenhoekii
MKKAYEAPTLVRLGSFRRKTGLLQRSGNDRLILSKN

SEQ ID NO: 705 - DNA, 108 bp, Streptomyces leeuwenhoekii; identical to SEQ ID NO: 703
  CDS (1)..(108)

SEQ ID NO: 706 - protein, 36 aa, Streptomyces leeuwenhoekii; identical to SEQ ID NO: 704

SEQ ID NO: 707 - DNA, 90 bp, Streptomyces mobaraensis
  CDS (1)..(90)
atgttcgaggtcggctctttccaggaggacaccggatacatcggcctcgagggctccgaaccgatcacgcacagcttctcgaagttctgg

SEQ ID NO: 708 - protein, 30 aa, Streptomyces mobaraensis
MFEVGSFQEDTGYIGLEGSEPITHSFSKFW

SEQ ID NO: 709 - DNA, 108 bp, Streptomyces leeuwenhoekii; identical to SEQ ID NO: 703
  CDS (1)..(108)

SEQ ID NO: 710 - protein, 36 aa, Streptomyces leeuwenhoekii; identical to SEQ ID NO: 704

SEQ ID NO: 711 - DNA, 141 bp, Streptomyces rimosus
  CDS (1)..(141)
atgcgggaagcgccggaagcgaacgagacggccgagtacgaaccacccgagctggccgaggccggtgctttcgccgagcggacactcggcttcaccggtgaactctccgacggctggggcggccagcacagcaccttctgg

SEQ ID NO: 712 - protein, 47 aa, Streptomyces rimosus
MREAPEANETAEYEPPELAEAGAFAERTLGFTGELSDGWGGQHSTFW

SEQ ID NO: 713 - DNA, 141 bp, Streptomyces sp.
  CDS (1)..(141)
atgcgggaagcgccggaagcgaacgagacggccgagtacgaaccacccgagctggccgacgccggagacttcgccgagcggacgctcggcttccacggtgagctcgccgacagctggggcggcctgcacagcaccttctgg

SEQ ID NO: 714 - protein, 47 aa, Streptomyces sp.
MREAPEANETAEYEPPELADAGDFAERTLGFHGELADSWGGLHSTFW

SEQ ID NO: 715 - DNA, 141 bp, Streptomyces rimosus; identical to SEQ ID NO: 711
  CDS (1)..(141)

SEQ ID NO: 716 - protein, 47 aa, Streptomyces rimosus; identical to SEQ ID NO: 712

SEQ ID NO: 717 - DNA, 108 bp, Streptomyces sp.; identical to SEQ ID NO: 699
  CDS (1)..(108)

SEQ ID NO: 718 - protein, 36 aa, Streptomyces sp.; identical to SEQ ID NO: 700

SEQ ID NO: 719 - DNA, 141 bp, Streptomyces rimosus; identical to SEQ ID NO: 689
  CDS (1)..(141)

SEQ ID NO: 720 - protein, 47 aa, Streptomyces rimosus; identical to SEQ ID NO: 690

SEQ ID NO: 721 - DNA, 108 bp, Streptomyces sp.
  CDS (1)..(108)
atgaagaagacgtacgaggcccccactctggtccgccgcggcggcttccggacaaagaccggcctgctcaggacgaacggcaacgaccgcctcatcctcagcaagaac

SEQ ID NO: 722 - protein, 36 aa, Streptomyces sp.
MKKTYEAPTLVRRGGFRTKTGLLRTNGNDRLILSKN

SEQ ID NO: 723 - DNA, 108 bp, Streptomyces bicolor
  CDS (1)..(108)
atgaagaaggcatacgaagcaccgacgctcgtccggctcggtacgttccgcaaggagacggggctccttcagcgctccggcaacgaccggctgatcttcagcaagaac

SEQ ID NO: 724 - protein, 36 aa, Streptomyces bicolor
MKKAYEAPTLVRLGTFRKETGLLQRSGNDRLIFSKN

SEQ ID NO: 725 - DNA, 102 bp, Streptomyces davawensis
  CDS (1)..(102)
atgtacgagcctccgaccctgatcctggcgggttccttcaggaccctcaccggtctaggcggacgcggtcccaaggacgtgctcttccggcaccagctcctt

SEQ ID NO: 726 - protein, 34 aa, Streptomyces davawensis
MYEPPTLILAGSFRTLTGLGGRGPKDVLFRHQLL

SEQ ID NO: 727 - DNA, 108 bp, Streptomyces scabiei
  CDS (1)..(108)
atgaagaaggcatacgaggcaccgatgctcgtccggctcggcacattccgcaaggagacggggctcctgggacgctccggcaacgaccggctgatcctgagcaagaac

SEQ ID NO: 728 - protein, 36 aa, Streptomyces scabiei
MKKAYEAPMLVRLGTFRKETGLLGRSGNDRLILSKN

SEQ ID NO: 729 - DNA, 135 bp, Streptomyces sp.
  CDS (1)..(135)
atgactgagcagaccgccgagtgcgacgtgtatgagccgccggcgctggtggaggccggtgagttcgcagaggtgaccatgggtgcgcatcaggacggaacctgcgacggtaccggcccgacctactaccgcagc

SEQ ID NO: 730 - protein, 45 aa, Streptomyces sp.
MTEQTAECDVYEPPALVEAGEFAEVTMGAHQDGTCDGTGPTYYRS

SEQ ID NO: 731 - DNA, 108 bp, Streptomyces xinghaiensis; identical to SEQ ID NO: 627
  CDS (1)..(108)

SEQ ID NO: 732 - protein, 36 aa, Streptomyces xinghaiensis; identical to SEQ ID NO: 628

SEQ ID NO: 733 - DNA, 135 bp, Novosphingobium resinovorum
  CDS (1)..(135)
atgaatcgcattgaaccttcggacgaagtcatcgaactcggtgatgctatcgcacagacccggggaccgagcattcccggtcagcccgacaccgaccgtccgctcaatttcgttctcggtctgagcgacgaggat

SEQ ID NO: 734 - protein, 45 aa, Novosphingobium resinovorum
MNRIEPSDEVIELGDAIAQTRGPSIPGQPDTDRPLNFVLGLSDED

SEQ ID NO: 735 - DNA, 135 bp, Novosphingobium resinovorum
  CDS (1)..(135)
atggaacatcaatttgagcacgatgaaatcgaagatttcggcgatgttgtcttcatgactagcggcccgcagatggttgggcatatcgagtccgatagaccggcctactacgtcatcggattcatcgagtgggac

SEQ ID NO: 736 - protein, 45 aa, Novosphingobium resinovorum
MEHQFEHDEIEDFGDVVFMTSGPQMVGHIESDRPAYYVIGFIEWD

SEQ ID NO: 737 - DNA, 135 bp, Novosphingobium resinovorum; identical to SEQ ID NO: 551
  CDS (1)..(135)

SEQ ID NO: 738 - protein, 45 aa, Novosphingobium resinovorum; identical to SEQ ID NO: 552

SEQ ID NO: 739 - DNA, 126 bp, Streptomyces sp.
  CDS (1)..(126)
atggtgtacgaaccgcccgtggtggaggagctcggcggcttcgccgagctgacgctcggtaccagcgtcggcacgttcttcgaaggcggctacgccccctggtactggcagatcccgccgacgggc

SEQ ID NO: 740 - protein, 42 aa, Streptomyces sp.
MVYEPPVVEELGGFAELTLGTSVGTFFEGGYAPWYWQIPPTG

SEQ ID NO: 741 - DNA, 99 bp, Streptomyces cattleya
  CDS (1)..(99)
atgctggtcgaggtcggctccttcgccgagctgacccgttcctaccactggggtgactaccacgactggcaccacggttggtacggctggtgggacgac

SEQ ID NO: 742 - protein, 33 aa, Streptomyces cattleya
MLVEVGSFAELTRSYHWGDYHDWHHGWYGWWDD

SEQ ID NO: 743 - DNA, 108 bp, Streptomyces durhamensis
  CDS (1)..(108)
atgaagaaggcctacgaagcaccgacgctcgtccggctcggctccttccgcaaggagaccggactcctgcagcggcacggcaacgaccggctcatcttcagcaagaac

SEQ ID NO: 744 - protein, 36 aa, Streptomyces durhamensis
MKKAYEAPTLVRLGSFRKETGLLQRHGNDRLIFSKN

SEQ ID NO: 745 - DNA, 132 bp, Sphingomonas wittichii
  CDS (1)..(132)
atggaaaagaccatcgaacatcgtgagaacgatgtgatcgacctcggcgccatcagcgtcgagaccaagggccagggcttcgtcatcgccgacgagagcggacagcgaaatctcctcggcctcaccgacgat

SEQ ID NO: 746 - protein, 44 aa, Sphingomonas wittichii
MEKTIEHRENDVIDLGAISVETKGQGFVIADESGQRNLLGLTDD

SEQ ID NO: 747 - DNA, 141 bp, Streptomyces rimosus; identical to SEQ ID NO: 689
  CDS (1)..(141)

SEQ ID NO: 748 - protein, 47 aa, Streptomyces rimosus; identical to SEQ ID NO: 690

SEQ ID NO: 749 - DNA, 141 bp, Streptomyces rimosus; identical to SEQ ID NO: 689
  CDS (1)..(141)

SEQ ID NO: 750 - protein, 47 aa, Streptomyces rimosus; identical to SEQ ID NO: 690

SEQ ID NO: 751 - DNA, 141 bp, Streptomyces sp.; identical to SEQ ID NO: 713
  CDS (1)..(141)

SEQ ID NO: 752 - protein, 47 aa, Streptomyces sp.; identical to SEQ ID NO: 714

SEQ ID NO: 753 - DNA, 138 bp, Streptomyces lavenduligriseus
  CDS (1)..(138)
atggagaaccgcgaggaggtctacgaggcgccgacgctgagcgaggccggcgacttcgccgaggtcaccctcggctggccgttcggacaccgccgcgacggcggtctcccgccgtactggctctacccctggaccgac

SEQ ID NO: 754 - protein, 46 aa, Streptomyces lavenduligriseus
MENREEVYEAPTLSEAGDFAEVTLGWPFGHRRDGGLPPYWLYPWTD

SEQ ID NO: 755 - DNA, 141 bp, Streptomyces rimosus; identical to SEQ ID NO: 711
  CDS (1)..(141)

SEQ ID NO: 756 - protein, 47 aa, Streptomyces rimosus; identical to SEQ ID NO: 712

SEQ ID NO: 757 - DNA, 120 bp, Sphingobium barthaii
  CDS (1)..(120)
atggaaaccgagagcgacctgatcgaccttggaccggtcacggtcgaaaccaagggcatcgccggcctgtcacgcgatcaggatcagtcgccgaagggcggcgcaggcatcctcgacgat

SEQ ID NO: 758 - protein, 40 aa, Sphingobium barthaii
METESDLIDLGPVTVETKGIAGLSRDQDQSPKGGAGILDD

SEQ ID NO: 759 - DNA, 108 bp, Streptomyces caatingaensis
  CDS (1)..(108)
atggtggaggccggcgaattcgctgagctgaccaggggtgtgccgcagggcaactggccggactacagcgtgatgtggccctggtacccgtcggccggtgcccagggc

SEQ ID NO: 760 - protein, 36 aa, Streptomyces caatingaensis
MVEAGEFAELTRGVPQGNWPDYSVMWPWYPSAGAQG

SEQ ID NO: 761 - DNA, 108 bp, Streptomyces sp.
  CDS (1)..(108)
atgaagaaggcatacgaggcgccgacgctcgtccggctcggtacgttccggaaggagacggggctcctccagcgctccggtcgcgaccggctgatcctgagcaagaac

SEQ ID NO: 762 - protein, 36 aa, Streptomyces sp.
MKKAYEAPTLVRLGTFRKETGLLQRSGRDRLILSKN

SEQ ID NO: 763 - DNA, 108 bp, Streptomyces sp.
  CDS (1)..(108)
atgaagaaggcatacgaagcgccgacactcgtccggctcggtacgttccgcaaggagacggggctcctgggagagcacggcaacgaccggctgatcctgagcaagaac

SEQ ID NO: 764 - protein, 36 aa, Streptomyces sp.
MKKAYEAPTLVRLGTFRKETGLLGEHGNDRLILSKN

SEQ ID NO: 765 - DNA, 129 bp, Sphingomonas parapaucimobilis
  CDS (1)..(129)
atggaacgcgataacgacaaggcacccacgctggtcgatctgggcgatgcccgtgtcctgacccaggggccggccggtaccccgatcgacgaggtccaggggttcctcggcgccggcttggccgacgac

SEQ ID NO: 766 - protein, 43 aa, Sphingomonas parapaucimobilis
MERDNDKAPTLVDLGDARVLTQGPAGTPIDEVQGFLGAGLADD

SEQ ID NO: 767 - DNA, 111 bp, Allokutzneria albata
  CDS (1)..(111)
atgaagaagacatacgagagtccggtgctgcttgaggcaggcactttcgccactgtcaccggccgtcgtggccgctggggtcgcgaccggcgctggcgcaggcgttggtgg

SEQ ID NO: 768 - protein, 37 aa, Allokutzneria albata
MKKTYESPVLLEAGTFATVTGRRGRWGRDRRWRRRWW

SEQ ID NO: 769 - DNA, 105 bp, Streptomyces achromogenes
  CDS (1)..(105)
atgctcagcgaggccggcgacttcgccgaggtcacgctcggctggccgttcggacaccgccgcgacggcggactcccgccgtactggctctacccctacggcgag

SEQ ID NO: 770 - protein, 35 aa, Streptomyces achromogenes
MLSEAGDFAEVTLGWPFGHRRDGGLPPYWLYPYGE

SEQ ID NO: 771 - DNA, 99 bp, Actinopolyspora halophila
  CDS (1)..(99)
atggtcgaggtcggttcgttcaacgaactgaccagggtcaagacctcgggtaactacatagacagtccgtacggcgtctggtgcgtcgggaactgcgga

SEQ ID NO: 772 - protein, 33 aa, Actinopolyspora halophila
MVEVGSFNELTRVKTSGNYIDSPYGVWCVGNCG

SEQ ID NO: 773 - DNA, 111 bp, Streptomyces sp.
  CDS (1)..(111)
atgaagaaggctttctacgagacccctgagttcacggctgcgggctccttccgcagcaagaccggcctggtcgtcatcatccaggccgactggaacgctcccggctggttc

SEQ ID NO: 774 - protein, 37 aa, Streptomyces sp.
MKKAFYETPEFTAAGSFRSKTGLVVIIQADWNAPGWF

SEQ ID NO: 775 - DNA, 108 bp, Streptomyces glaucescens
  CDS (1)..(108)
atgaagaaggcgtacgaggccccgacgctcgtccggctcggatcgttccgccagaagaccggactgctgcagcgccacggcaacgaccgtctgatcctcagcaagaac

SEQ ID NO: 776 - protein, 36 aa, Streptomyces glaucescens
MKKAYEAPTLVRLGSFRQKTGLLQRHGNDRLILSKN

SEQ ID NO: 777 - DNA, 108 bp, Streptomyces sp.; identical to SEQ ID NO: 699
  CDS (1)..(108)

SEQ ID NO: 778 - protein, 36 aa, Streptomyces sp.; identical to SEQ ID NO: 700

SEQ ID NO: 779 - DNA, 123 bp, Nocardiopsis halophila
  CDS (1)..(123)
atgcaggacacccgcccgcgctacatccgccctgttctcacccacctcggcgaattcaaggacgtgacgctcggcggcggctccctccccatctacgacggattcgtcctcggcatcttctac

SEQ ID NO: 780 - protein, 41 aa, Nocardiopsis halophila
MQDTRPRYIRPVLTHLGEFKDVTLGGGSLPIYDGFVLGIFY

SEQ ID NO: 781 - DNA, 126 bp, Amycolatopsis decaplanina
gtgaagggtgtttacgagtcccctgcgctgcaggccgctggggccttctcgaaggtgactggttgcggcaagtgcggctggggtcgtgatcgttactgccggcgcggccaccaccactggtgctgg

SEQ ID NO: 782 - protein, 42 aa, Amycolatopsis decaplanina
MKGVYESPALQAAGAFSKVTGCGKCGWGRDRYCRRGHHHWCW

SEQ ID NO: 783 - DNA, 126 bp, Amycolatopsis decaplanina; identical to SEQ ID NO: 781

SEQ ID NO: 784 - protein, 42 aa, Amycolatopsis decaplanina; identical to SEQ ID NO: 782

SEQ ID NO: 785 - DNA, 105 bp, Streptomyces sp.
  CDS (1)..(105)
atgacgtacgagcgtcccacactgaccaaggccggcagcttccgcaaggtgacgggcatcaagaacaccggccccaaggatgttctcggcggcaagcagctcctc

SEQ ID NO: 786 - protein, 35 aa, Streptomyces sp.
MTYERPTLTKAGSFRKVTGIKNTGPKDVLGGKQLL

SEQ ID NO: 787 - DNA, 123 bp, Nocardiopsis halophila; identical to SEQ ID NO: 779
  CDS (1)..(123)

SEQ ID NO: 788 - protein, 41 aa, Nocardiopsis halophila; identical to SEQ ID NO: 780

SEQ ID NO: 789 - DNA, 111 bp, Streptomyces sp.; identical to SEQ ID NO: 773
  CDS (1)..(111)

SEQ ID NO: 790 - protein, 37 aa, Streptomyces sp.; identical to SEQ ID NO: 774

SEQ ID NO: 791 - DNA, 129 bp, Streptomyces leeuwenhoekii
  CDS (1)..(129)
atggagcacgacgagaagacgccgtacgagacccctgcggtgtacggattgggcgcgttcgccgaggagacgggcctgtacggggtgcgcaacgacgaggagatcaactggcacttcgactactggacc

SEQ ID NO: 792 - protein, 43 aa, Streptomyces leeuwenhoekii
MEHDEKTPYETPAVYGLGAFAEETGLYGVRNDEEINWHFDYWT

SEQ ID NO: 793 - DNA, 141 bp, Streptomyces rimosus; identical to SEQ ID NO: 689
  CDS (1)..(141)

SEQ ID NO: 794 - protein, 47 aa, Streptomyces rimosus; identical to SEQ ID NO: 690

SEQ ID NO: 795 - DNA, 129 bp, Streptomyces leeuwenhoekii; identical to SEQ ID NO: 791
  CDS (1)..(129)

SEQ ID NO: 796 - protein, 43 aa, Streptomyces leeuwenhoekii; identical to SEQ ID NO: 792

SEQ ID NO: 797 - DNA, 105 bp, Streptomyces caatingaensis
  CDS (1)..(105)
atgacgtacgagcgtcccaccgtcgccaaggccggcagcttccgcaaggtgaccggcatcaagaacaccggcccgaaggacgtgctcggcggcaagcagctcctc

SEQ ID NO: 798 - protein, 35 aa, Streptomyces caatingaensis
MTYERPTVAKAGSFRKVTGIKNTGPKDVLGGKQLL

SEQ ID NO: 799 - DNA, 141 bp, Nonomuraea candida
  CDS (1)..(141)
atggagaacgtccacgaccgcccgcagagcccctatgagccgcccgtgatccaggaggccggcggcttcgccggcgtcacccacggccccggcctcgggggcgaccctgacaccttcacttactacttcgacttcggcaac

SEQ ID NO: 800 - protein, 47 aa, Nonomuraea candida
MENVHDRPQSPYEPPVIQEAGGFAGVTHGPGLGGDPDTFTYYFDFGN

SEQ ID NO: 801 - DNA, 147 bp, Asticcacaulis sp.
  CDS (1)..(147)
atgcgtaccaatgacaagcccgtcgactatgctccgctggtcgaagacatcatcgaactgggcaccgccagcgtcgaaacgcaaggtggcgcccaaggcggcccggagccgtcggaccagcagaaccgcatgggtatttccgaagac

SEQ ID NO: 802 - protein, 49 aa, Asticcacaulis sp.
MRTNDKPVDYAPLVEDIIELGTASVETQGGAQGGPEPSDQQNRMGISED

SEQ ID NO: 803 - DNA, 135 bp, Streptomyces albus
  CDS (1)..(135)
atgcagaacaccgacatctacgaacccccggtcctcatcgaggccggcgggttcatggagctgaccctcggcgcggagaagggcggcatcaccgacttcgcgggatggttcgacatcttcgctgacttccagggc

SEQ ID NO: 804 - protein, 45 aa, Streptomyces albus
MQNTDIYEPPVLIEAGGFMELTLGAEKGGITDFAGWFDIFADFQG

SEQ ID NO: 805 - DNA, 90 bp, Streptomyces sp.
  CDS (1)..(90)
atgatcgagtgtggctccttccaggaggacaccggctacttcgggctgaccggctacgagaaccttttccacttctacgacaagctccac

SEQ ID NO: 806 - protein, 30 aa, Streptomyces sp.
MIECGSFQEDTGYFGLTGYENLFHFYDKLH

SEQ ID NO: 807 - DNA, 105 bp, Streptomyces sp.
  CDS (1)..(105)
atgctgagcgaggccggtgacttcaccgaggtcaccctcggctggccgtggggcgaccgctacgacggcggactgccgccgtactggcgtttcccctacggcggc

SEQ ID NO: 808 - protein, 35 aa, Streptomyces sp.
MLSEAGDFTEVTLGWPWGDRYDGGLPPYWRFPYGG

SEQ ID NO: 809 - DNA, 96 bp, Streptomyces bingchenggensis; identical to SEQ ID NO: 159
  CDS (1)..(96)

SEQ ID NO: 810 - protein, 32 aa, Streptomyces bingchenggensis; identical to SEQ ID NO: 160

SEQ ID NO: 811 - DNA, 132 bp, Streptomyces bingchenggensis; identical to SEQ ID NO: 161
  CDS (1)..(132)

SEQ ID NO: 812 - protein, 44 aa, Streptomyces bingchenggensis; identical to SEQ ID NO: 162

SEQ ID NO: 813 - DNA, 135 bp, Erythrobacter citreus
  CDS (1)..(135)
atgaaggatttcgaacataatgagaatgaggtcattgacctcggaaaggcctcggtggagaccaagggcaacgccctgttcgatatcgatgtgagcagcggccggctgtcttacgcgactggcctcgccgaaggc

SEQ ID NO: 814 - protein, 45 aa, Erythrobacter citreus
MKDFEHNENEVIDLGKASVETKGNALFDIDVSSGRLSYATGLAEG

SEQ ID NO: 815 - DNA, 105 bp, Streptomyces roseoverticillatus
  CDS (1)..(105)
atgacgtatgagcgtcccaccctcgccaaggccggcagcttccgcaaggtgacgggcctcaaggaccacggcccgaaggacgtcctgggcggcaagcaggttctc

SEQ ID NO: 816 - protein, 35 aa, Streptomyces roseoverticillatus
MTYERPTLAKAGSFRKVTGLKDHGPKDVLGGKQVL

SEQ ID NO: 817 - DNA, 132 bp, Streptomyces natalensis
  CDS (1)..(132)
atggaggagccggccgtggagccggtgaccacgtcgtacgagccgccgatggtgacggaggccggtgccttcgccgaggtgacccgcggcggcattggcacgttcaaggaagcgggggttggccgcttcatg

SEQ ID NO: 818 - protein, 44 aa, Streptomyces natalensis
MEEPAVEPVTTSYEPPMVTEAGAFAEVTRGGIGTFKEAGVGRFM

SEQ ID NO: 819 - DNA, 129 bp, Sphingopyxis sp.; identical to SEQ ID NO: 539
  CDS (1)..(129)

SEQ ID NO: 820 - protein, 43 aa, Sphingopyxis sp.; identical to SEQ ID NO: 540

SEQ ID NO: 821 - DNA, 117 bp, Actinomadura atramentaria
  CDS (1)..(117)
atgcaggcgtacgaaccgcccgcgctcgtcgagatcggcgacctccgcgaggtcacgctgggcaagggcacctggggctgggacaacgccaaccagtgcctgtggctgcactgcgtc

SEQ ID NO: 822 - protein, 39 aa, Actinomadura atramentaria
MQAYEPPALVEIGDLREVTLGKGTWGWDNANQCLWLHCV

SEQ ID NO: 823 - DNA, 132 bp, Streptomyces natalensis; identical to SEQ ID NO: 817
  CDS (1)..(132)

SEQ ID NO: 824 - protein, 44 aa, Streptomyces natalensis; identical to SEQ ID NO: 818

SEQ ID NO: 825 - DNA, 147 bp, Streptomyces aurantiacus
gtgatcgctgtgagcgaggcactgaagaacatcgagatcgaggatgtctacgagccgccgctgctcgtcgaggcgggggagtacgccgaggcgacgcagggcagcatcggcaggttccccgaggtctcgttcaactggtggcctttc

SEQ ID NO: 826 - protein, 49 aa, Streptomyces aurantiacus
MIAVSEALKNIEIEDVYEPPLLVEAGEYAEATQGSIGRFPEVSFNWWPF

SEQ ID NO: 827 - DNA, 147 bp, Streptomyces aurantiacus; identical to SEQ ID NO: 825

SEQ ID NO: 828 - protein, 49 aa, Streptomyces aurantiacus; identical to SEQ ID NO: 826

SEQ ID NO: 829 - DNA, 126 bp, Paenibacillus polymyxa
  CDS (1)..(126)
atgagtaaaaaagaatggcaggaaccgacgattgaggtgctggatattaaccagactatggcgggtaaaggctggaaacagattgattgggtgtcagatcatgatgccgatctgtataatcccagc

SEQ ID NO: 830 - protein, 42 aa, Paenibacillus polymyxa
MSKKEWQEPTIEVLDINQTMAGKGWKQIDWVSDHDADLYNPS

SEQ ID NO: 831 - DNA, 126 bp, Paenibacillus polymyxa; identical to SEQ ID NO: 829
  CDS (1)..(126)

SEQ ID NO: 832 - protein, 42 aa, Paenibacillus polymyxa; identical to SEQ ID NO: 830

SEQ ID NO: 833 - DNA, 111 bp, Klebsiella variicola
  CDS (1)..(111)
atgaaaaaagtgactcttaaaaaactcaataagagagccagcaaagttacgcgtggatctgatggcccaatcattgagttctttaatccgaacggagttatgcactacggc

SEQ ID NO: 834 - protein, 37 aa, Klebsiella variicola
MKKVTLKKLNKRASKVTRGSDGPIIEFFNPNGVMHYG

SEQ ID NO: 835 - DNA, 111 bp, Klebsiella variicola; identical to SEQ ID NO: 833
  CDS (1)..(111)

SEQ ID NO: 836 - protein, 37 aa, Klebsiella variicola; identical to SEQ ID NO: 834

SEQ ID NO: 837 - DNA, 126 bp, Paenibacillus polymyxa; identical to SEQ ID NO: 829
  CDS (1)..(126)

SEQ ID NO: 838 - protein, 42 aa, Paenibacillus polymyxa; identical to SEQ ID NO: 830

SEQ ID NO: 839 - DNA, 138 bp, Streptomyces megasporus
  CDS (1)..(138)
atgaacgagcacgaagccagggagaccgagccccgtgaagattacgcggctccgcagttggtggagctgggcgcggttccggcggtgacgctcggcaggtacgccgaggacagccaggaccagggccgctacttcgaa

SEQ ID NO: 840 - protein, 46 aa, Streptomyces megasporus
MNEHEARETEPREDYAAPQLVELGAVPAVTLGRYAEDSQDQGRYFE

SEQ ID NO: 841 - DNA, 150 bp, Mesorhizobium ciceri
  CDS (1)..(150)
atggaacagaatgttgaaaagcatgaatacgaaacgccaagcctgacggtccatggttcgattgagaccatcacccagggcggcggcggcagcacggcgatcgacgcatcgttccccgcgcatacgccgatcggcgacctgacgttctcc

SEQ ID NO: 842 - protein, 50 aa, Mesorhizobium ciceri
MEQNVEKHEYETPSLTVHGSIETITQGGGGSTAIDASFPAHTPIGDLTFS

SEQ ID NO: 843 - DNA, 150 bp, Mesorhizobium ciceri; identical to SEQ ID NO: 841
  CDS (1)..(150)

SEQ ID NO: 844 - protein, 50 aa, Mesorhizobium ciceri; identical to SEQ ID NO: 842

SEQ ID NO: 845 - DNA, 150 bp, Mesorhizobium sp.
  CDS (1)..(150)
atggaacagaatgttgagaagcaggagtacgaaacccccagcctgacggtgcatggttcgattgaaacgatcacgcagggcggtgctggcacgacggcgcttgacgcgagctttcccgcgcacacgccggtcggcgagctgactttctct

SEQ ID NO: 846 - protein, 50 aa, Mesorhizobium sp.
MEQNVEKQEYETPSLTVHGSIETITQGGAGTTALDASFPAHTPVGELTFS

SEQ ID NO: 847 - DNA, 138 bp, Sphingomonas sp.
  CDS (1)..(138)
atgcccaaaactgaatatgagacgcccgaactgatcgatgcgggcctgttcgaggagatcaccgagggcggagccaacggctcggtcctcgacgccagcttctccgcagggaccccggtctccgacctgaccttttcc

SEQ ID NO: 848 - protein, 46 aa, Sphingomonas sp.
MPKTEYETPELIDAGLFEEITEGGANGSVLDASFSAGTPVSDLTFS

SEQ ID NO: 849 - DNA, 150 bp, Mesorhizobium sp.
  CDS (1)..(150)
atggaacagaatgttgaaaagcatgagtacgagacccccagcctgacggttcacggttcgattgaatccatcacgcagggcggtgctggcacgacggcgcttgacgcgagctttcccgcgcacacgccggtcggcgagctgactttctct

SEQ ID NO: 850 - protein, 50 aa, Mesorhizobium sp.
MEQNVEKHEYETPSLTVHGSIESITQGGAGTTALDASFPAHTPVGELTFS

SEQ ID NO: 851 - DNA, 138 bp, Sphingomonas sp.; identical to SEQ ID NO: 847
  CDS (1)..(138)

SEQ ID NO: 852 - protein, 46 aa, Sphingomonas sp.; identical to SEQ ID NO: 848

SEQ ID NO: 853 - DNA, 150 bp, Mesorhizobium plurifarium
  CDS (1)..(150)
atggaacagaatgttgaaaagcatgagtatgaaacccccagcctgacggttcacggttcgattgaaacgatcacgcagggcggtgctggcacgacggcgcttgacgcgagctttcccgcgcacacgccggtcggcgagctgaccttctct

SEQ ID NO: 854 - protein, 50 aa, Mesorhizobium plurifarium
MEQNVEKHEYETPSLTVHGSIETITQGGAGTTALDASFPAHTPVGELTFS

SEQ ID NO: 855 - DNA, 126 bp, Paenibacillus polymyxa; identical to SEQ ID NO: 829
  CDS (1)..(126)

SEQ ID NO: 856 - protein, 42 aa, Paenibacillus polymyxa; identical to SEQ ID NO: 830

SEQ ID NO: 857 - DNA, 123 bp, Paenibacillus sonchi
  CDS (1)..(123)
atgaaaaaggaatacagcaagcctgcattggaagtactcgatgtgaaaatgactatggctggacctggtgttgctatcgtcgacgcgttccaagatgatccggatgaagtacaacactactcc

SEQ ID NO: 858 - protein, 41 aa, Paenibacillus sonchi
MKKEYSKPALEVLDVKMTMAGPGVAIVDAFQDDPDEVQHYS

SEQ ID NO: 859 - DNA, 123 bp, Paenibacillus sonchi; identical to SEQ ID NO: 857
  CDS (1)..(123)

SEQ ID NO: 860 - protein, 41 aa, Paenibacillus sonchi; identical to SEQ ID NO: 858

SEQ ID NO: 861 - DNA, 150 bp, Mesorhizobium sp.
  CDS (1)..(150)
atggaacagaatgttgagaagcaagagtacgagacccccagcctgacggttcacggttcgatcgaaacgatcacgcagggtgcctcgggcacgacggctcttgacgcggcatttcccgcgcatacgccgatcggcgacctcaccttctcc

SEQ ID NO: 862 - protein, 50 aa, Mesorhizobium sp.
MEQNVEKQEYETPSLTVHGSIETITQGASGTTALDAAFPAHTPIGDLTFS

SEQ ID NO: 863 - DNA, 138 bp, Sphingomonas sp.; identical to SEQ ID NO: 847
  CDS (1)..(138)

SEQ ID NO: 864 - protein, 46 aa, Sphingomonas sp.; identical to SEQ ID NO: 848

SEQ ID NO: 865 - DNA, 195 bp, Calothrix sp.
  CDS (1)..(195)
atgaaaacagcatacagctcaccaagactaatcaatcacggtaatgtaagtcaagttacccaagccaaccttgccaacaaaacaagtgacttactttttggaacagtacaaggtactgttcctggtaatggtggctccctagatgcttgcatctttcctaaaaacgattcaagatgcaaaggtgcaaatctgaac

SEQ ID NO: 866 - protein, 65 aa, Calothrix sp.
MKTAYSSPRLINHGNVSQVTQANLANKTSDLLFGTVQGTVPGNGGSLDACIFPKNDSRCKGANLN

SEQ ID NO: 867 - DNA, 138 bp, Sphingomonas sp.; identical to SEQ ID NO: 847
  CDS (1)..(138)

SEQ ID NO: 868 - protein, 46 aa, Sphingomonas sp.; identical to SEQ ID NO: 848

SEQ ID NO: 869 - DNA, 141 bp, Frankia sp.
  CDS (1)..(141)
atggtgacggttgacctccagtcgcacgagggtccggcggaaaaggatccggtgctgctggtgtgcctcggtgaggcgtcgatggtgacactcggccagggcaagggcagcgcggaggacaagcggaaggcgtataacagc

SEQ ID NO: 870 - protein, 47 aa, Frankia sp.
MVTVDLQSHEGPAEKDPVLLVCLGEASMVTLGQGKGSAEDKRKAYNS

SEQ ID NO: 871 - DNA, 150 bp, Mesorhizobium amorphae
  CDS (1)..(150)
atggaacagaatgttgaaaagcatgaatacgaaacgcctagcctgacggtccacggttcgatcgagaccatcacgcaaggcggcggcggctcgacggcgctcgacgcgtcgttccccgcgcatacgccgatcggcgaactcacgttctcc

SEQ ID NO: 872 - protein, 50 aa, Mesorhizobium amorphae
MEQNVEKHEYETPSLTVHGSIETITQGGGGSTALDASFPAHTPIGELTFS

SEQ ID NO: 873 - DNA, 156 bp, Pseudonocardia acaciae
  CDS (1)..(156)
atggcgcatcaacaggatttcgagtcgagtgcgggtggcgccggatgggtccatccgttgatcgaggaggtcggcacgatcgtggacatcacgctcggccggtgtgccgggaacaccctggatggctaccagtactggcgttgctgttggtctgcc

SEQ ID NO: 874 - protein, 52 aa, Pseudonocardia acaciae
MAHQQDFESSAGGAGWVHPLIEEVGTIVDITLGRCAGNTLDGYQYWRCCWSA

SEQ ID NO: 875 - DNA, 195 bp, Pseudonocardia acaciae
gtggggtggccgcgcccgtcagcgcgggcgggcgcggccaccagaacactgggccggcaatcagatggcgacgcagcagaagcagtacctgctgccgccgtcctgttggaggccgtagttcccaccgagggtgatgtcgacgaccgttccgacctcctcgatcgacggtcgaacccactccaccgacgcgtcagc

SEQ ID NO: 876 - protein, 65 aa, Pseudonocardia acaciae
MGWPRPSARAGAATRTLGRQSDGDAAEAVPAAAVLLEAVVPTEGDVDDRSDLLDRRSNPLHRRVS

SEQ ID NO: 877 - DNA, 159 bp, Pseudonocardia acaciae
  CDS (1)..(159)
atggagaaaaaccaacacgccaagttagctgacgcgtcggtggagtgggttcgaccgtcgatcgaggaggtcggaacggtcgtcgacatcaccctcggtgggaactacggcctccaacaggacggcggcagcaggtactgcttctgctgcgtcgccatc

SEQ ID NO: 878 - protein, 53 aa, Pseudonocardia acaciae
MEKNQHAKLADASVEWVRPSIEEVGTVVDITLGGNYGLQQDGGSRYCFCCVAI

SEQ ID NO: 879 - DNA, 126 bp, Paenibacillus polymyxa; identical to SEQ ID NO: 829
  CDS (1)..(126)

SEQ ID NO: 880 - protein, 42 aa, Paenibacillus polymyxa; identical to SEQ ID NO: 830

SEQ ID NO: 881 - DNA, 81 bp, Rhodobacter sphaeroides
  CDS (1)..(81)
atgacccatggtgcgaccgacggctgggccctcgacgcctcgttcccggtggacactcccaagggcgacctgaccttctcc

SEQ ID NO: 882 - protein, 27 aa, Rhodobacter sphaeroides
MTHGATDGWALDASFPVDTPKGDLTFS

SEQ ID NO: 883 - DNA, 81 bp, Rhodobacter sphaeroides; identical to SEQ ID NO: 881
  CDS (1)..(81)

SEQ ID NO: 884 - protein, 27 aa, Rhodobacter sphaeroides
MTHGATDGWALDASFPVDTPKGDLTFS

SEQ ID NO: 885 - DNA, 141 bp, Bacillus firmus
  CDS (1)..(141)
atgtcagaaaaaaaagatgttaaaattgaatactccacgccaaaatttgtagagtacggaagtgctgttgatttaactaaaggaagccttcagtcacagttagcagaaggcactgatccttggactggctatcgtcgttct

SEQ ID NO: 886 - protein, 47 aa, Bacillus firmus
MSEKKDVKIEYSTPKFVEYGSAVDLTKGSLQSQLAEGTDPWTGYRRS

SEQ ID NO: 887 - DNA, 81 bp, Rhodobacter sphaeroides; identical to SEQ ID NO: 881
  CDS (1)..(81)

SEQ ID NO: 888 - protein, 27 aa, Rhodobacter sphaeroides
MTHGATDGWALDASFPVDTPKGDLTFS

SEQ ID NO: 889 - DNA, 162 bp, Dyadobacter crusticola
  CDS (1)..(162)
atgaaattttttacctccacagaatcaggttcattacccaagaaatcctatcaaaagccgcggcttaaaaaattgggcagcgtcgtacaacttacaaagttgggtaagctggggtcgcagttcgacgccaatgagcccactagcaataatttttctgacgat

SEQ ID NO: 890 - protein, 54 aa, Dyadobacter crusticola
MKFFTSTESGSLPKKSYQKPRLKKLGSVVQLTKLGKLGSQFDANEPTSNNFSDD

SEQ ID NO: 891 - DNA, 150 bp, Mesorhizobium ciceri; identical to SEQ ID NO: 841
  CDS (1)..(150)

SEQ ID NO: 892 - protein, 50 aa, Mesorhizobium ciceri; identical to SEQ ID NO: 842

SEQ ID NO: 893 - DNA, 117 bp, Paenibacillus dauci
  CDS (1)..(117)
atgcaatggcaagcaccaaccttggaagttttggatgtacatcaaacagcggcaggtaaaggctggagagtcatcgactgggttacttatgacgatgcggatctgtacaacccgagc

SEQ ID NO: 894 - protein, 39 aa, Paenibacillus dauci
MQWQAPTLEVLDVHQTAAGKGWRVIDWVTYDDADLYNPS

SEQ ID NO: 895 - DNA, 120 bp, Paenibacillus wulumuqiensis
  CDS (1)..(120)
atgcaatggcaagctccagcgctggaagttttggaaatgaacgaaactgcggcaggtaaaggctggaaagcaattgactgggtcacttatgatgacgcagacctgtacaatccaggcagc

SEQ ID NO: 896 - protein, 40 aa, Paenibacillus wulumuqiensis
MQWQAPALEVLEMNETAAGKGWKAIDWVTYDDADLYNPGS

SEQ ID NO: 897 - DNA, 99 bp, Paenibacillus wulumuqiensis
  CDS (1)..(99)
atgcaggtcctggatgtgaatgagactgcagctggtaaaggctggagagtcattgactgggttacttacgatgatgctgatctgtacaacccgggcagc

SEQ ID NO: 898 - protein, 33 aa, Paenibacillus wulumuqiensis
MQVLDVNETAAGKGWRVIDWVTYDDADLYNPGS

SEQ ID NO: 899 - DNA, 102 bp, Paenibacillus wulumuqiensis
  CDS (1)..(102)
atgttggaagttttggatgtcaatgaaacagcagctggtaaaggctggaaagtcattgactgggttacttacgatgatgctgacctgtacaacccaggtagc

SEQ ID NO: 900 - protein, 34 aa, Paenibacillus wulumuqiensis
MLEVLDVNETAAGKGWKVIDWVTYDDADLYNPGS

SEQ ID NO: 901 - DNA, 126 bp, Nocardiopsis kunsanensis
  CDS (1)..(126)
atggacgcttcggtcattcccgtccctctcgacacggacgagtccgtcatcgacctcggcgacgccgccgacctgaccctcggcgagggcagcgcccgcaacgagaacaagcgcaacccgtacaac

SEQ ID NO: 902 - protein, 42 aa, Nocardiopsis kunsanensis
MDASVIPVPLDTDESVIDLGDAADLTLGEGSARNENKRNPYN

SEQ ID NO: 903 - DNA, 123 bp, Bacillus manliponensis
  CDS (1)..(123)
atgaaagaacaatgggaaaaaccagaattagaaatacttactattcatatgacaatggctggaccaggattgagaattgctgatgccgaacagactgatccagacgaagatgttcactatagt

SEQ ID NO: 904 - protein, 41 aa, Bacillus manliponensis
MKEQWEKPELEILTIHMTMAGPGLRIADAEQTDPDEDVHYS

SEQ ID NO: 905 - DNA, 198 bp, Verrucomicrobium sp.
  CDS (1)..(198)
atgaagagcaatagggataggggaaatcgggaactcaaccagtcggcggtccttgggaaggatgggcggcggaagccctacgaggcgccgcgcctggtcgtccttggtacggtcgaagagctcacgaaggccaagggccttcttttgaccgatacggctcttaccggaagcaccgttacgaccgtgaccgtcctcggc

SEQ ID NO: 906 - protein, 66 aa, Verrucomicrobium sp.
MKSNRDRGNRELNQSAVLGKDGRRKPYEAPRLVVLGTVEELTKAKGLLLTDTALTGSTVTTVTVLG

SEQ ID NO: 907 - DNA, 129 bp, Paenibacillus sp.
  CDS (1)..(129)
atgagtaaaaaagaatggcaggaaccgacgatagaggtgctggacattaaccagaccatggcggggaaaggctggaaacagattgattgggtgtccgaccacgatgccgatctttataatccaccaagc

SEQ ID NO: 908 - protein, 43 aa, Paenibacillus sp.
MSKKEWQEPTIEVLDINQTMAGKGWKQIDWVSDHDADLYNPPS

SEQ ID NO: 909 - DNA, 111 bp, Streptomyces ochraceiscleroticus
  CDS (1)..(111)
atgcgcctgcgttacacgcctccgaaagtcgtccgaatcggacgagtcgagaagttgaccgggcaactgcggcggggtacccccgacgtgctcggccacggcaacctggcc

SEQ ID NO: 910 - protein, 37 aa, Streptomyces ochraceiscleroticus
MRLRYTPPKVVRIGRVEKLTGQLRRGTPDVLGHGNLA

SEQ ID NO: 911 - DNA, 138 bp, Risungbinella massiliensis
  CDS (1)..(138)
atggaaaaccaaaaacaagaaaagaaagagtacacatcgccaaacttaatcgtacttggcaacatcgtagagattacttttggtggcgctggtggacacgacacagacacctactctaccaaatacccacgtagcgaa

SEQ ID NO: 912 - protein, 46 aa, Risungbinella massiliensis
MENQKQEKKEYTSPNLIVLGNIVEITFGGAGGHDTDTYSTKYPRSE

SEQ ID NO: 913 - DNA, 96 bp, Risungbinella massiliensis
  CDS (1)..(96)
atgctattcgctacgtgggtatttggtagagtaggtgtctgtgtcgtgtccaccagcgccaccaaaagtaatctctacgatgttgccaagtacgat

SEQ ID NO: 914 - protein, 32 aa, Risungbinella massiliensis
MLFATWVFGRVGVCVVSTSATKSNLYDVAKYD

SEQ ID NO: 915 - DNA, 123 bp, Paenibacillus sonchi; identical to SEQ ID NO: 857
  CDS (1)..(123)

SEQ ID NO: 916 - protein, 41 aa, Paenibacillus sonchi; identical to SEQ ID NO: 858

SEQ ID NO: 917 - DNA, 126 bp, Paenibacillus polymyxa
  CDS (1)..(126)
atgagtaaaaaagaatggcaggaaccgacgatagaggtgctggatattaaccagactatggcgggtaaaggctggaaacagattgactgggtatctgaccacgatgccgatcttcataatccaagc

SEQ ID NO: 918 - protein, 42 aa, Paenibacillus polymyxa
MSKKEWQEPTIEVLDINQTMAGKGWKQIDWVSDHDADLHNPS

SEQ ID NO: 919 - DNA, 126 bp, Paenibacillus polymyxa; identical to SEQ ID NO: 829
  CDS (1)..(126)

SEQ ID NO: 920 - protein, 42 aa, Paenibacillus polymyxa; identical to SEQ ID NO: 830

SEQ ID NO: 921 - DNA, 126 bp, Paenibacillus polymyxa; identical to SEQ ID NO: 829
  CDS (1)..(126)

SEQ ID NO: 922 - protein, 42 aa, Paenibacillus polymyxa; identical to SEQ ID NO: 830

SEQ ID NO: 923 - DNA, 147 bp, Sphingopyxis fribergensis
  CDS (1)..(147)
atgcatacacttccgaaatcggcttatgcgaagccggaactcgtcgaagtcggttctttcgaggacgtgacgctcggcggcagctcggggtccaatctggacgccgattttccctcggggaccccgtttagcgatctcaccttctcc

SEQ ID NO: 924 - protein, 49 aa, Sphingopyxis fribergensis
MHTLPKSAYAKPELVEVGSFEDVTLGGSSGSNLDADFPSGTPFSDLTFS

SEQ ID NO: 925 - DNA, 141 bp, Sphingopyxis fribergensis
  CDS (1)..(141)
atggagggtatccatgcatacacttccgaaatcggcttatgcgaagccggaactcgtcgaagtcggttctttcgaggacgtgacgctcggcggcagctcggggtccaatctggacgccgattttccctcggggaccccgtt

SEQ ID NO: 926 - protein, 47 aa, Sphingopyxis fribergensis
MEGIHAYTSEIGLCEAGTRRSRFFRGRDARRQLGVQSGRRFSLGDPV

SEQ ID NO: 927 - DNA, 126 bp, Paenibacillus sp.
  CDS (1)..(126)
atgagcaaaaaagaatggcaggaaccaacgatagaggtactggatattaaccagaccatggcaggtaaaggctggaaaaatattgattgggtgtccgacttcgatgccgatctttataatccaagc

SEQ ID NO: 928 - protein, 42 aa, Paenibacillus sp.
MSKKEWQEPTIEVLDINQTMAGKGWKNIDWVSDFDADLYNPS

SEQ ID NO: 929 - DNA, 147 bp, Sphingopyxis fribergensis; identical to SEQ ID NO: 923
  CDS (1)..(147)

SEQ ID NO: 930 - protein, 49 aa, Sphingopyxis fribergensis; identical to SEQ ID NO: 924

SEQ ID NO: 931 - DNA, 141 bp, Sphingopyxis fribergensis; identical to SEQ ID NO: 925
  CDS (1)..(141)

SEQ ID NO: 932 - protein, 47 aa, Sphingopyxis fribergensis; identical to SEQ ID NO: 926

SEQ ID NO: 933 - DNA, 105 bp, Corynebacterium minutissimum
  CDS (1)..(105)
atggtgccgacgctgaccatgttgggtcggttcagcgcggcaacacgtggtgctgccataccttggttagaaactacgctcgtcacgcataacagtatggccggt

SEQ ID NO: 934 - protein, 35 aa, Corynebacterium minutissimum
MVPTLTMLGRFSAATRGAAIPWLETTLVTHNSMAG

SEQ ID NO: 935 - DNA, 123 bp, Paenibacillus wynnii
  CDS (1)..(123)
atgaaaaaagaatacagcagaccttctctcgaagtgttggatgtaaacatgaccctgttgggtcctggtaaagcaaaaccggattccgttcaggatgatccggatgaaatcgtaaacttctcc

SEQ ID NO: 936 - protein, 41 aa, Paenibacillus wynnii
MKKEYSRPSLEVLDVNMTLLGPGKAKPDSVQDDPDEIVNFS

SEQ ID NO: 937 - DNA, 126 bp, Paenibacillus sp.
  CDS (1)..(126)
atgagtaaaaaagaatggcaggagcccaccatagaggtgctggatattaaccagacgatggcaggtaagggctggaaagaaattgactgggtatctgatcacgacgctgacctggttaatccaagc

SEQ ID NO: 938 - protein, 42 aa, Paenibacillus sp.
MSKKEWQEPTIEVLDINQTMAGKGWKEIDWVSDHDADLVNPS

SEQ ID NO: 939 - DNA, 150 bp, Pseudanabaena sp.
  CDS (1)..(150)
atgattggcaaaaacaacaaaaagacttattcagccatcaaaatttctaaattgggttccgttgcggcaatgactcaagccatgaatacaggcgcatatggagactttgctcgcctgagtatggcaatgaggatgatgatggtggatgga

SEQ ID NO: 940 - protein, 50 aa, Pseudanabaena sp.
MIGKNNKKTYSAIKISKLGSVAAMTQAMNTGAYGDFARLSMAMRMMMVDG

SEQ ID NO: 941 - DNA, 138 bp, Sphingobium yanoikuyae
  CDS (1)..(138)
atggaaaaggagtcttatgaatcgcccgagctcgtcgaactcggctcgttcgaatcgctgacgcagggcacgtcctatggcgaaagcctggacgcgaccttcccggacggtacgccgcgcggcgagctcacgttctcc

SEQ ID NO: 942 - protein, 46 aa, Sphingobium yanoikuyae
MEKESYESPELVELGSFESLTQGTSYGESLDATFPDGTPRGELTFS

SEQ ID NO: 943 - DNA, 126 bp, Paenibacillus polymyxa
  CDS (1)..(126)
atgagtaaaaaagaatggcaggaaccgacgatagaggtgctggatattagccagaccatggcggggaaaggctggagacagattgattgggtgtccgaccacgatgccgatatttataatccaagc

SEQ ID NO: 944 - protein, 42 aa, Paenibacillus polymyxa
MSKKEWQEPTIEVLDISQTMAGKGWRQIDWVSDHDADIYNPS

SEQ ID NO: 945 - DNA, 126 bp, Paenibacillus polymyxa; identical to SEQ ID NO: 917
  CDS (1)..(126)

SEQ ID NO: 946 - protein, 42 aa, Paenibacillus polymyxa; identical to SEQ ID NO: 918

SEQ ID NO: 947 - DNA, 177 bp, Sulfurovum sp.
  CDS (1)..(177)
atgatagaaaaaaaccattcggatttctcaggagaaacagagagacaaaagaaaccgtattcttctccgaaaatagaaataatagcgaatgtgagaatggcaacaaaaggatccacaataggcggtactgatagtggtgggcaaagtgccaatgttccgtcagatccaggtggctgg

SEQ ID NO: 948 - protein, 59 aa, Sulfurovum sp.
MIEKNHSDFSGETERQKKPYSSPKIEIIANVRMATKGSTIGGTDSGGQSANVPSDPGGW

SEQ ID NO: 949 - DNA, 126 bp, Paenibacillus polymyxa; identical to SEQ ID NO: 917
  CDS (1)..(126)

SEQ ID NO: 950 - protein, 42 aa, Paenibacillus polymyxa; identical to SEQ ID NO: 918

SEQ ID NO: 951 - DNA, 150 bp, Mesorhizobium plurifarium; identical to SEQ ID NO: 853
  CDS (1)..(150)

SEQ ID NO: 952 - protein, 50 aa, Mesorhizobium plurifarium; identical to SEQ ID NO: 854

SEQ ID NO: 953 - DNA, 126 bp, Chitinophaga pinensis
  CDS (1)..(126)
atgaaaaacgaaacaactcaacaaaagaccacatgggagacacctgatatgacagtgcttccgattaatgacgttacacttggcgcaggtgcggccggtactgactttgcgtccgaaataagtgtc

SEQ ID NO: 954 - protein, 42 aa, Chitinophaga pinensis
MKNETTQQKTTWETPDMTVLPINDVTLGAGAAGTDFASEISV

SEQ ID NO: 955 - DNA, 132 bp, Chitinophaga pinensis
  CDS (1)..(132)
atgaaaaacaacacatcacaacaaccacttacctgggaaacccctgatatgatcgtactccccattgataaggttacactcggcaaagctggatccggttcagattttgcagctgaatgggaagtcagtacc

SEQ ID NO: 956 - protein, 44 aa, Chitinophaga pinensis
MKNNTSQQPLTWETPDMIVLPIDKVTLGKAGSGSDFAAEWEVST

SEQ ID NO: 957 - DNA, 105 bp, Sphingomonas sp.
  CDS (1)..(105)
atggaggtaggatcgtttgaggcggtgacgcagggtggtgccgacggcaccgtgctggacgcgtcattctcctccggaacgccggtttcggatctgactttttcc

SEQ ID NO: 958 - protein, 35 aa, Sphingomonas sp.
MEVGSFEAVTQGGADGTVLDASFSSGTPVSDLTFS

SEQ ID NO: 959 - DNA, 180 bp, Streptomyces roseoverticillatus
  CDS (1)..(180)
atggagagcacgcacgacccgatcacgccggcgaccgaccactccgcgaccgtccagcgctcccgcaccgtcaagcgcccttacgtggaaccgcagatcgacgagctcggcaccgtcgagcacctcactgcccacggcggcatcctccttcccgactcgccgaacagccgcacgctcctc

SEQ ID NO: 960 - protein, 60 aa, Streptomyces roseoverticillatus
MESTHDPITPATDHSATVQRSRTVKRPYVEPQIDELGTVEHLTAHGGILLPDSPNSRTLL

SEQ ID NO: 961 - DNA, 99 bp, Paenibacillus dauci
  CDS (1)..(99)
atgcaggtcctggatgttaatgagacagcagctggtaaaggctggaaagtcattgactgggttacttacgatgacgccgatctgtacaacccgggcagc

SEQ ID NO: 962 - protein, 33 aa, Paenibacillus dauci
MQVLDVNETAAGKGWKVIDWVTYDDADLYNPGS

SEQ ID NO: 963 - DNA, 117 bp, Paenibacillus dauci; identical to SEQ ID NO: 893
  CDS (1)..(117)

SEQ ID NO: 964 - protein, 39 aa, Paenibacillus dauci; identical to SEQ ID NO: 894

SEQ ID NO: 965 - DNA, 99 bp, Paenibacillus dauci
  CDS (1)..(99)
atggaagttttggaaatgaacgaaactgccgcaggtaaaggctggaaagcaattgactgggtcacttatgatgacgcagacctgtacaacccaggtagc

SEQ ID NO: 966 - protein, 33 aa, Paenibacillus dauci
MEVLEMNETAAGKGWKAIDWVTYDDADLYNPGS

SEQ ID NO: 967 - DNA, 120 bp, Paenibacillus dauci
  CDS (1)..(120)
atgcaatggcaagctccaacgttggaagttttggatgtcaatgaaacagcagcaggtaaaggctggaaagtcattgactgggttacttatgatgatgctgatctgtacaacccaggcagc

SEQ ID NO: 968 - protein, 40 aa, Paenibacillus dauci
MQWQAPTLEVLDVNETAAGKGWKVIDWVTYDDADLYNPGS

SEQ ID NO: 969 - DNA, 132 bp, Clostridium butyricum
  CDS (1)..(132)
atgaaaaaagagtggaatgatccaaaattagtagaattatcagtgcaacatacagaacaaagtcctagttggttaactaataaggatggagaatttgttgatgctaatgggaattattgggaaagtagaagc

SEQ ID NO: 970 - protein, 44 aa, Clostridium butyricum
MKKEWNDPKLVELSVQHTEQSPSWLTNKDGEFVDANGNYWESRS

SEQ ID NO: 971 - DNA, 108 bp, Streptomyces peruviensis
  CDS (1)..(108)
atgcagaagtacacggcacctaccatcatttgcctggggcggatcgaggaactgaccgggcagcttcgtcgtggagttcctgacctcctcggtcacggcaacattctg

SEQ ID NO: 972 - protein, 36 aa, Streptomyces peruviensis
MQKYTAPTIICLGRIEELTGQLRRGVPDLLGHGNIL

SEQ ID NO: 973 - DNA, 126 bp, Paenibacillus polymyxa; identical to SEQ ID NO: 917
  CDS (1)..(126)

SEQ ID NO: 974 - protein, 42 aa, Paenibacillus polymyxa; identical to SEQ ID NO: 918

SEQ ID NO: 975 - DNA, 126 bp, Paenibacillus polymyxa; identical to SEQ ID NO: 943
  CDS (1)..(126)

SEQ ID NO: 976 - protein, 42 aa, Paenibacillus polymyxa; identical to SEQ ID NO: 944

SEQ ID NO: 977 - DNA, 138 bp, Sphingobium yanoikuyae; identical to SEQ ID NO: 941
  CDS (1)..(138)

SEQ ID NO: 978 - protein, 46 aa, Sphingobium yanoikuyae; identical to SEQ ID NO: 942

SEQ ID NO: 979 - DNA, 126 bp, Paenibacillus polymyxa; identical to SEQ ID NO: 917
  CDS (1)..(126)

SEQ ID NO: 980 - protein, 42 aa, Paenibacillus polymyxa; identical to SEQ ID NO: 918

SEQ ID NO: 981 - DNA, 150 bp, Mesorhizobium plurifarium
  CDS (1)..(150)
atggaacagaatgttcaaaagcatgagtatgagacccccagcctgacggttcacggttcgattgaaacgatcacgcagggcggtgctggcacgacggcgcttgacgcgagctttcccgcgcacacgccggtcggcgagctgaccttctct

SEQ ID NO: 982 - protein, 50 aa, Mesorhizobium plurifarium
MEQNVQKHEYETPSLTVHGSIETITQGGAGTTALDASFPAHTPVGELTFS

SEQ ID NO: 983 - DNA, 129 bp, Paenibacillus sp.; identical to SEQ ID NO: 907
  CDS (1)..(129)

SEQ ID NO: 984 - protein, 43 aa, Paenibacillus sp.; identical to SEQ ID NO: 908

SEQ ID NO: 985 - DNA, 123 bp, Streptomyces caatingaensis
  CDS (1)..(123)
atggccgtcgaagccctggacgtctacgagcccccgctgctggccgaggccggcgactacaccgaactcacgcagggattcgggtacttcgcgtgcgagggcgagtacgggtacttcggatac

SEQ ID NO: 986 - protein, 41 aa, Streptomyces caatingaensis
MAVEALDVYEPPLLAEAGDYTELTQGFGYFACEGEYGYFGY

SEQ ID NO: 987 - DNA, 135 bp, Nonomuraea candida
  CDS (1)..(135)
atgcaggacggacggagcacgcaggacgagtacgaggcccccgcgctggaggaactcggctccttccaggagctgaccgggtatgtggggctgcgcaacagagagtcgctcctcggctatccccgcaacatctgg

SEQ ID NO: 988 - protein, 45 aa, Nonomuraea candida
MQDGRSTQDEYEAPALEELGSFQELTGYVGLRNRESLLGYPRNIW

SEQ ID NO: 989 - DNA, 105 bp, Streptomyces sp.; identical to SEQ ID NO: 785
  CDS (1)..(105)

SEQ ID NO: 990 - protein, 35 aa, Streptomyces sp.; identical to SEQ ID NO: 786

SEQ ID NO: 991 - DNA, 117 bp, Streptomyces lavendulae
  CDS (1)..(117)
atgatcaagaagatctacgaggttcccgtcttctccgccgcgggctccttccgcgccgacaccggaatgggtctcccggccggctcctgggactggaagggcattcgcggtttcatt

SEQ ID NO: 992 - protein, 39 aa, Streptomyces lavendulae
MIKKIYEVPVFSAAGSFRADTGMGLPAGSWDWKGIRGFI

SEQ ID NO: 993 - DNA, 123 bp, Streptomyces caatingaensis; identical to SEQ ID NO: 985
  CDS (1)..(123)

SEQ ID NO: 994 - protein, 41 aa, Streptomyces caatingaensis; identical to SEQ ID NO: 986

SEQ ID NO: 995 - DNA, 105 bp, Streptomyces rimosus
  CDS (1)..(105)
atgacgtacgagcgccccacactcaccaaggccggcggcttccgcaaggtgacgggcgtcaagaacaccggtcccaaggatgttctcggcggcaagcagctcctc

SEQ ID NO: 996 - protein, 35 aa, Streptomyces rimosus
MTYERPTLTKAGGFRKVTGVKNTGPKDVLGGKQLL

SEQ ID NO: 997 - DNA, 105 bp, Streptomyces rimosus; identical to SEQ ID NO: 995
  CDS (1)..(105)

SEQ ID NO: 998 - protein, 35 aa, Streptomyces rimosus; identical to SEQ ID NO: 996

SEQ ID NO: 999 - DNA, 105 bp, Streptomyces rimosus; identical to SEQ ID NO: 995
  CDS (1)..(105)

SEQ ID NO: 1000 - protein, 35 aa, Streptomyces rimosus; identical to SEQ ID NO: 996

SEQ ID NO: 1001 - DNA, 105 bp, Streptomyces sp.
  CDS (1)..(105)
atggcctacgaacgccccactctcaccaaggtcggcgacttccagaaggtcaccggactggccggccagggcagccccgaccttctgggcggccacagcctgctc

SEQ ID NO: 1002 - protein, 35 aa, Streptomyces sp.
MAYERPTLTKVGDFQKVTGLAGQGSPDLLGGHSLL

SEQ ID NO: 1003 - DNA, 105 bp, Streptomyces rimosus; identical to SEQ ID NO: 995
  CDS (1)..(105)

SEQ ID NO: 1004 - protein, 35 aa, Streptomyces rimosus; identical to SEQ ID NO: 996

SEQ ID NO: 1005 - DNA, 105 bp, Streptomyces rimosus; identical to SEQ ID NO: 995
  CDS (1)..(105)

SEQ ID NO: 1006 - protein, 35 aa, Streptomyces rimosus; identical to SEQ ID NO: 996

SEQ ID NO: 1007 - DNA, 105 bp, Streptomyces rimosus; identical to SEQ ID NO: 995
  CDS (1)..(105)

SEQ ID NO: 1008 - protein, 35 aa, Streptomyces rimosus; identical to SEQ ID NO: 996

SEQ ID NO: 1009 - DNA, 105 bp, Streptomyces rimosus; identical to SEQ ID NO: 995
  CDS (1)..(105)

SEQ ID NO: 1010 - protein, 35 aa, Streptomyces rimosus; identical to SEQ ID NO: 996

SEQ ID NO: 1011 - DNA, 105 bp, Streptomyces rimosus; identical to SEQ ID NO: 995
  CDS (1)..(105)

SEQ ID NO: 1012 - protein, 35 aa, Streptomyces rimosus; identical to SEQ ID NO: 996

SEQ ID NO: 1013 - DNA, 105 bp, Streptomyces sp.
  CDS (1)..(105)
atgacgtacgagcgccccaccctcaccaaggccggcagcttccgcaaggtgaccgggatcaaggacaacgggcccaaggacatcctcggcggcaagcagattctc

SEQ ID NO: 1014 - protein, 35 aa, Streptomyces sp.
MTYERPTLTKAGSFRKVTGIKDNGPKDILGGKQIL

SEQ ID NO: 1015 - DNA, 147 bp, Asticcacaulis excentricus
  CDS (1)..(147)
atgaccaagcgtacgaccatcgccgcccgccgcgtgggactgatcgatctcggcaaggccacccgccagaccaagggtctgacgcaaatccaggccctcgacagcgtgtctggccagttccgcgaccagctgggtctgtcggcggac

SEQ ID NO: 1016 - protein, 49 aa, Asticcacaulis excentricus
MTKRTTIAARRVGLIDLGKATRQTKGLTQIQALDSVSGQFRDQLGLSAD

SEQ ID NO: 1017 - DNA, 147 bp, Asticcacaulis excentricus
  CDS (1)..(147)
atgcgtacttataatcgcagccttcccgcccgcgcgggtctgaccgacctcggcaaggtcaccactcacacaaaggggccgacccccatggttgggcttgatagcgtgagcggccaatactgggatcagcacgccccgctggcggac

SEQ ID NO: 1018 - protein, 49 aa, Asticcacaulis excentricus
MRTYNRSLPARAGLTDLGKVTTHTKGPTPMVGLDSVSGQYWDQHAPLAD

SEQ ID NO: 1019 - DNA, 105 bp, Streptomyces rimosus
  CDS (1)..(105)
atgacgtacgagcgccccacactcaccagggccggcggcttccgcaaggtgacgggtgtcaagaacaccggccccaaggatgttctcggcggcaagcagctcctc

SEQ ID NO: 1020 - protein, 35 aa, Streptomyces rimosus
MTYERPTLTRAGGFRKVTGVKNTGPKDVLGGKQLL

SEQ ID NO: 1021 - DNA, 105 bp, Streptomyces toyocaensis
  CDS (1)..(105)
atggcttacgagcgtcccactctcaccaaggtcggcgacttccagaaggtcacgggcctggccgggacgggcagccccgacctgctgggcggccacagcctgctc

SEQ ID NO: 1022 - protein, 35 aa, Streptomyces toyocaensis
MAYERPTLTKVGDFQKVTGLAGTGSPDLLGGHSLL

SEQ ID NO: 1023 - DNA, 117 bp, Novosphingobium sp.
  CDS (1)..(117)
atggaacgtgaagacgaagtgatcgacctcggcaccgcaaccatcgaaaccaagggcggcgccggcctggtgatcgattccaagaacagccagcagcttttcggcattgccgaagac

SEQ ID NO: 1024 - protein, 39 aa, Novosphingobium sp.
MEREDEVIDLGTATIETKGGAGLVIDSKNSQQLFGIAED

SEQ ID NO: 1025 - DNA, 105 bp, Streptomyces rimosus; identical to SEQ ID NO: 995
  CDS (1)..(105)

SEQ ID NO: 1026 - protein, 35 aa, Streptomyces rimosus; identical to SEQ ID NO: 996

SEQ ID NO: 1027 - DNA, 105 bp, Streptomyces rimosus; identical to SEQ ID NO: 995
  CDS (1)..(105)

SEQ ID NO: 1028 - protein, 35 aa, Streptomyces rimosus; identical to SEQ ID NO: 996

SEQ ID NO: 1029 - DNA, 105 bp, Streptomyces rimosus; identical to SEQ ID NO: 995
  CDS (1)..(105)

SEQ ID NO: 1030 - protein, 35 aa, Streptomyces rimosus; identical to SEQ ID NO: 996

SEQ ID NO: 1031 - DNA, 117 bp, Kitasatospora sp.
  CDS (1)..(117)
atgaccgacgacgtgtacgagcccccggtgatgatcgaactcggcgacttcgcggacctcacccggggcttcgacatcggcaaccagtccgacgtccacggctactacctcgccccc

SEQ ID NO: 1032 - protein, 39 aa, Kitasatospora sp.
MTDDVYEPPVMIELGDFADLTRGFDIGNQSDVHGYYLAP

SEQ ID NO: 1033 - DNA, 108 bp, Nocardia transvalensis
  CDS (1)..(108)
atgtacgaaccaccccttctggtggagatcgggaagttcaccgaactgactcgcgggtcgagctacgtgataatcgagggctacccgagcgcgtgggggtcgaactac

SEQ ID NO: 1034 - protein, 36 aa, Nocardia transvalensis
MYEPPLLVEIGKFTELTRGSSYVIIEGYPSAWGSNY

SEQ ID NO: 1035 - DNA, 120 bp, Nonomuraea candida
  CDS (1)..(120)
atgcgcgaccacatcgcgtacgagtccccggccatcaccgagctgggcgacttcgccgcagagaccggcgtggggctcggcgacgagtacgagccctcgtggccgatcgccgaccggccg

SEQ ID NO: 1036 - protein, 40 aa, Nonomuraea candida
MRDHIAYESPAITELGDFAAETGVGLGDEYEPSWPIADRP

SEQ ID NO: 1037 - DNA, 129 bp, Nonomuraea candida
  CDS (1)..(129)
atgcgcgaccacatcgtgtacgagtccccggccatcaccgagctgggtggcttcggcacggagaccggcgagttcgtcggcccgtgcgaggagacctggctgccgttcaacgactactcctgccccgcg

SEQ ID NO: 1038 - protein, 43 aa, Nonomuraea candida
MRDHIVYESPAITELGGFGTETGEFVGPCEETWLPFNDYSCPA

SEQ ID NO: 1039 - DNA, 135 bp, Novosphingobium subterraneum
  CDS (1)..(135)
atgacccaagacacgccccgcgaggacaccctgatcgatctgggtgaagcctcgaccacaaccaagggccaggcaatcgtcgaactcgacgtcagcggtggcaacctccggttcctcccgggcatcgctgccgag

SEQ ID NO: 1040 - protein, 45 aa, Novosphingobium subterraneum
MTQDTPREDTLIDLGEASTTTKGQAIVELDVSGGNLRFLPGIAAE

SEQ ID NO: 1041 - DNA, 123 bp, Streptomyces sp.
  CDS (1)..(123)
atggaggatgcggagtcctacgagccgccgcgggtgaccgaggccggtgacttcaccgaggtcaccctcggggggttcggcacccgcgccgatgggggcgcgccgccgttccagacgtggggc

SEQ ID NO: 1042 - protein, 41 aa, Streptomyces sp.
MEDAESYEPPRVTEAGDFTEVTLGGFGTRADGGAPPFQTWG

SEQ ID NO: 1043 - DNA, 123 bp, Streptomyces sp.; identical to SEQ ID NO: 1041
  CDS (1)..(123)

SEQ ID NO: 1044 - protein, 41 aa, Streptomyces sp.; identical to SEQ ID NO: 1042

SEQ ID NO: 1045 - DNA, 105 bp, Streptomyces rimosus; identical to SEQ ID NO: 1019
  CDS (1)..(105)

SEQ ID NO: 1046 - protein, 35 aa, Streptomyces rimosus; identical to SEQ ID NO: 1020

SEQ ID NO: 1047 - DNA, 105 bp, Streptomyces rimosus; identical to SEQ ID NO: 1019
  CDS (1)..(105)

SEQ ID NO: 1048 - protein, 35 aa, Streptomyces rimosus; identical to SEQ ID NO: 1020

SEQ ID NO: 1049 - DNA, 120 bp, Thermobifida fusca
  CDS (1)..(120)
atggaaaagaagaagtacaccgctccgcagctcgctaaggtcggcgaattcaaggaggccaccggctggtacaccgcggaatggggcctcgagctgatcttcgtcttcccgcgcttcatc

SEQ ID NO: 1050 - protein, 40 aa, Thermobifida fusca
MEKKKYTAPQLAKVGEFKEATGWYTAEWGLELIFVFPRFI

SEQ ID NO: 1051 - DNA, 135 bp, Streptomyces sp.; identical to SEQ ID NO: 729
  CDS (1)..(135)

SEQ ID NO: 1052 - protein, 45 aa, Streptomyces sp.; identical to SEQ ID NO: 730

SEQ ID NO: 1053 - DNA, 123 bp, Streptomyces lavenduligriseus
  CDS (1)..(123)
atggacaaccaggaagtgacgggtgaggagtacgagtccccgatgatggtcgaactcggggagttcgccgagctgacgaacggcatcggttcccggacctgggacagcatctggctgtgggac

SEQ ID NO: 1054 - protein, 41 aa, Streptomyces lavenduligriseus
MDNQEVTGEEYESPMMVELGEFAELTNGIGSRTWDSIWLWD

SEQ ID NO: 1055 - DNA, 129 bp, Sphingobium chlorophenolicum
  CDS (1)..(129)
atggaacgcaacgacgaacggcatgacgacctgatcgacctcggcgccgccagcaccgagacccagggccggcccgggcttcagctcgagttcggcgtgatcgcccagcccatcggcatcgaggccgag

SEQ ID NO: 1056 - protein, 43 aa, Sphingobium chlorophenolicum
MERNDERHDDLIDLGAASTETQGRPGLQLEFGVIAQPIGIEAE

SEQ ID NO: 1057 - DNA, 132 bp, Novosphingobium sp.
  CDS (1)..(132)
atggaacgtgaaacccagcacatcgaagagggtgtgatcgaactcggcgcggtcagcgagcgcaccgagggcaacggcgacgttgccgccgaccaggtcggtcttcggatccagaccggcatttccgacgac

SEQ ID NO: 1058 - protein, 44 aa, Novosphingobium sp.
MERETQHIEEGVIELGAVSERTEGNGDVAADQVGLRIQTGISDD

SEQ ID NO: 1059 - DNA, 132 bp, Novosphingobium malaysiense
  CDS (1)..(132)
atggaacgtgaaacccagcacatcgaagagggtgtgatcgaactcggcgcggtcagcgaacgcaccgagggcaacggcgacgttgctgccgaccaggtcggtcttcggatccagaccggcatttccgacaac

SEQ ID NO: 1060 - protein, 44 aa, Novosphingobium malaysiense
MERETQHIEEGVIELGAVSERTEGNGDVAADQVGLRIQTGISDN

SEQ ID NO: 1061 - DNA, 120 bp, Thermobifida fusca; identical to SEQ ID NO: 1049
  CDS (1)..(120)

SEQ ID NO: 1062 - protein, 40 aa, Thermobifida fusca; identical to SEQ ID NO: 1050

SEQ ID NO: 1063 - DNA, 123 bp, Streptomyces sp.; identical to SEQ ID NO: 1041
  CDS (1)..(123)

SEQ ID NO: 1064 - protein, 41 aa, Streptomyces sp.; identical to SEQ ID NO: 1042

SEQ ID NO: 1065 - DNA, 129 bp, Sphingobium xenophagum
  CDS (1)..(129)
atggaacgcgacaaccatctggaagccgacctggtcgacctgggatcggtgaccgagcagacgaagggcaacaacggcgtcgacatcgaccaggctcagcagcggctgcagtccgggctttccgacgac

SEQ ID NO: 1066 - protein, 43 aa, Sphingobium xenophagum
MERDNHLEADLVDLGSVTEQTKGNNGVDIDQAQQRLQSGLSDD

SEQ ID NO: 1067 - DNA, 135 bp, Citromicrobium sp.
  CDS (1)..(135)
atgaaggagttcgaccataaccagaatgaggttatcgacctcggcaaggcctcggttgagaccaagggcgccgtcggtttctacatcgacgccagcggcgggcaattggccaacagcccgggcctgctcgacgaa

SEQ ID NO: 1068 - protein, 45 aa, Citromicrobium sp.
MKEFDHNQNEVIDLGKASVETKGAVGFYIDASGGQLANSPGLLDE

SEQ ID NO: 1069 - DNA, 135 bp, Asticcacaulis benevestitus
  CDS (1)..(135)
atggaaaagattgaaacccacgaagacctgatcgacctcggcgccgcttcgtcggaaaccaagggcgtcggcttcggccgtcccgacagcatcctgacgcaggaacaagcgaagccgatgggccttgatcgcgat

SEQ ID NO: 1070 - protein, 45 aa, Asticcacaulis benevestitus
MEKIETHEDLIDLGAASSETKGVGFGRPDSILTQEQAKPMGLDRD

SEQ ID NO: 1071 - DNA, 105 bp, Streptomyces rimosus; identical to SEQ ID NO: 995
  CDS (1)..(105)

SEQ ID NO: 1072 - protein, 35 aa, Streptomyces rimosus; identical to SEQ ID NO: 996

SEQ ID NO: 1073 - DNA, 114 bp, Streptomyces sp.
  CDS (1)..(114)
atgtactccaagcctaccctgctgaaggttggtgagttttccaagctcacgatgcacagccgtcctcgtcgtaaggacaagggacaccgtcggcgccccaaggggattttcctc

SEQ ID NO: 1074 - protein, 38 aa, Streptomyces sp.
MYSKPTLLKVGEFSKLTMHSRPRRKDKGHRRRPKGIFL

SEQ ID NO: 1075 - DNA, 105 bp, Streptomyces rimosus; identical to SEQ ID NO: 995
  CDS (1)..(105)

SEQ ID NO: 1076 - protein, 35 aa, Streptomyces rimosus; identical to SEQ ID NO: 996

SEQ ID NO: 1077 - DNA, 135 bp, Citromicrobium sp.; identical to SEQ ID NO: 1067
  CDS (1)..(135)

SEQ ID NO: 1078 - protein, 45 aa, Citromicrobium sp.; identical to SEQ ID NO: 1068

SEQ ID NO: 1079 - DNA, 135 bp, Unknown
  Description of Unknown: Sphingomonas-like bacterium sequence
  CDS (1)..(135)
atggaacgcgatgacgaacgcctcgacaatgaggtcatcgatctcggctcggtcatcaccgagacgaagggcggcgtgcagggcttcgacgatacgccctcgggcctgcgcatcaagatgggcctcaccaacgat

SEQ ID NO: 1080 - protein, 45 aa, Unknown
  Description of Unknown: Sphingomonas-like bacterium sequence
MERDDERLDNEVIDLGSVITETKGGVQGFDDTPSGLRIKMGLTND

SEQ ID NO: 1081 - DNA, 126 bp, Streptomyces achromogenes
  CDS (1)..(126)
atggagaagaaccccgaagtggcgggtgaggagtacgagtccccgatcatggtcgaactcggggagttcacggagctgaccaacggcatcggttcccagacctgggacaccatctggctgtgggac

SEQ ID NO: 1082 - protein, 42 aa, Streptomyces achromogenes
MEKNPEVAGEEYESPIMVELGEFTELTNGIGSQTWDTIWLWD

SEQ ID NO: 1083 - DNA, 114 bp, Amycolatopsis azurea
  CDS (1)..(114)
atgtattcgaagccgaccttgctcaagctcggttctttcgagcggctgaccaagcacagccgtccggccaaaaaggacaaggccggacgtcggcgtccgcgtcacgtcctgctc

SEQ ID NO: 1084 - protein, 38 aa, Amycolatopsis azurea
MYSKPTLLKLGSFERLTKHSRPAKKDKAGRRRPRHVLL

SEQ ID NO: 1085 - DNA, 117 bp, Novosphingobium lindaniclasticum
  CDS (1)..(117)
atggaacggaatgacgatgtgatcgagctgggcaccgccagcatcgaaacccagggcctcggcggccagaaccccgatgtgggcattggccaggaggtcgctggtctctccaacgac

SEQ ID NO: 1086 - protein, 39 aa, Novosphingobium lindaniclasticum
MERNDDVIELGTASIETQGLGGQNPDVGIGQEVAGLSND

SEQ ID NO: 1087 - DNA, 129 bp, Asticcacaulis sp.
  CDS (1)..(129)
atgaccaaaattgaacctcaagacgtcatcgaccttggcgccgcaagcgccgagaccaagggcatgcagacccagttccaggctgatgacgcgcttcagcacaagccgaaccctggcctcagccatgac

SEQ ID NO: 1088 - protein, 43 aa, Asticcacaulis sp.
MTKIEPQDVIDLGAASAETKGMQTQFQADDALQHKPNPGLSHD

SEQ ID NO: 1089 - DNA, 135 bp, Asticcacaulis sp.
  CDS (1)..(135)
atgaccaagttcgatcatgaaaccgaagacctcatcgacctgggccacgcttcggtcgaaaccaagggcaatcaaacgatctacgcgcccgacgaggtcgcccagcacctgcggcaacccggtctgagcaacgac

SEQ ID NO: 1090 - protein, 45 aa, Asticcacaulis sp.
MTKFDHETEDLIDLGHASVETKGNQTIYAPDEVAQHLRQPGLSND

SEQ ID NO: 1091 - DNA, 129 bp, Sphingobium sp.
  CDS (1)..(129)
atgaaccacgaacatgagacggacgatctgatcgaactcggcaatgcgagcaccgacacgaagggcggtgccttcatcgtcgaggacaatgaagggagcctcagtctccagacgggcctcaccgacgac

SEQ ID NO: 1092 - protein, 43 aa, Sphingobium sp.
MNHEHETDDLIELGNASTDTKGGAFIVEDNEGSLSLQTGLTDD

SEQ ID NO: 1093 - DNA, 135 bp, Novosphingobium sp.
  CDS (1)..(135)
atggaaaagaccattgataccctcgaagacaaagtcgtcgatctcggctcggtgactgaagaaacccgcggcatcgtgggtgcactcgaagaccagcagggcggccaacgtgctgctcttggcctcaccgacgac

SEQ ID NO: 1094 - protein, 45 aa, Novosphingobium sp.
MEKTIDTLEDKVVDLGSVTEETRGIVGALEDQQGGQRAALGLTDD

SEQ ID NO: 1095 - DNA, 135 bp, Novosphingobium malaysiense
  CDS (1)..(135)
atggaacgtgaagaaaccggccgcgaagacgacggcacgatcgagctgggcgctgtcagcgtggaaacctgcggcggcatcggcccgcagttcgacctccagctccaccagcccgtcgccggcattctcgacgac

SEQ ID NO: 1096 - protein, 45 aa, Novosphingobium malaysiense
MEREETGREDDGTIELGAVSVETCGGIGPQFDLQLHQPVAGILDD

SEQ ID NO: 1097 - DNA, 114 bp, Caulobacter sp.
  CDS (1)..(114)
atgtcggcgatccgcaaagtccgtttcgtcaagctcggcgacgccaagcgcctgacccatgggggtggggaccacggcgtcgactggctggcccagccgatggagccgcaaggc

SEQ ID NO: 1098 - protein, 38 aa, Caulobacter sp.
MSAIRKVRFVKLGDAKRLTHGGGDHGVDWLAQPMEPQG

SEQ ID NO: 1099 - DNA, 114 bp, Caulobacter sp.
  CDS (1)..(114)
atgaccaagacccgcaagttccgcctggttcgcctcggcgacgccaaggtcctgacccagggccagggcgaccagaacttcgagatcaacaccctgcccggcaaggacgtcggc

SEQ ID NO: 1100 - protein, 38 aa, Caulobacter sp.
MTKTRKFRLVRLGDAKVLTQGQGDQNFEINTLPGKDVG

SEQ ID NO: 1101 - DNA, 138 bp, Sphingobium japonicum
  CDS (1)..(138)
atggatcgtcatgacaactccgaggtcgatgagatcatcgacctcggcaccgccagcgccgttacccaggggatgggaagcggctcgaccgatcagaacggtcagcccaaaaacctgatcggcggcatttctgacgac

SEQ ID NO: 1102 - protein, 46 aa, Sphingobium japonicum
MDRHDNSEVDEIIDLGTASAVTQGMGSGSTDQNGQPKNLIGGISDD

SEQ ID NO: 1103 - DNA, 117 bp, Sphingomonas sanxanigenens
  CDS (1)..(117)
atggaacgcaacgacgacgtgatcgaactcggcaccgccagcgtcgagacgatgggtcccggcggccagcccgccgatgaattcctcggccaggaccagacgggcctcaccgacgac

SEQ ID NO: 1104 - protein, 39 aa, Sphingomonas sanxanigenens
MERNDDVIELGTASVETMGPGGQPADEFLGQDQTGLTDD

SEQ ID NO: 1105 - DNA, 129 bp, Sphingomonas paucimobilis
  CDS (1)..(129)
atggaacgcaccgaagtaaccgaggaggtcatcgacctcggcacaatcgtcgaacaaacgcacggctcagccgtcaatttcgccgacaccgatggcgggcagcgtatcctgcccggcctctccgacgat

SEQ ID NO: 1106 - protein, 43 aa, Sphingomonas paucimobilis
MERTEVTEEVIDLGTIVEQTHGSAVNFADTDGGQRILPGLSDD

SEQ ID NO: 1107 - DNA, 99 bp, Sphingobium sp.
  CDS (1)..(99)
atgatcgaccttggcgcaatcagcgtcgagacgaagggcccgggccttggccagggtgacgagatcgggctgcagaacccggtcggcctttccgacgac

SEQ ID NO: 1108 - protein, 33 aa, Sphingobium sp.
MIDLGAISVETKGPGLGQGDEIGLQNPVGLSDD

SEQ ID NO: 1109 - DNA, 117 bp, Streptomyces ruber
  CDS (1)..(117)
atgtccaaggagaaatacgaagccccgacggttgtcgaactgggctacttcggcgaggagacaggattcatcggcccgatccactatgaaggaattcttctgtggcactcctggttc

SEQ ID NO: 1110 - protein, 39 aa, Streptomyces ruber
MSKEKYEAPTVVELGYFGEETGFIGPIHYEGILLWHSWF

SEQ ID NO: 1111 - DNA, 141 bp, Asticcacaulis benevestitus
  CDS (1)..(141)
atgaaaactttgatcgcatccgcccgcaaggccggcacaacgcacctcggcgccttcaccaagcaaaccaagggcggcggccagtaccacaaggccgacgaaacctcggaatttcgccccaacccgatgctgtcgaacgac

SEQ ID NO: 1112 - protein, 47 aa, Asticcacaulis benevestitus
MKTLIASARKAGTTHLGAFTKQTKGGGQYHKADETSEFRPNPMLSND

SEQ ID NO: 1113 - DNA, 132 bp, Sphingobium sp.
  CDS (1)..(132)
atggaacgcaacgatgatcgcaacgtcgatgaactgatcgacctcgggtcggtcacagaagaaaccaagggccccggcatcggcggcaacgacggcgctggcgagcaggtcctgatgggcctcaccgacgaa

SEQ ID NO: 1114 - protein, 44 aa, Sphingobium sp.
MERNDDRNVDELIDLGSVTEETKGPGIGGNDGAGEQVLMGLTDE

SEQ ID NO: 1115 - DNA, 126 bp, Streptomyces sp.
  CDS (1)..(126)
atgctggagaacaccgggaccgaggacgtctacgagccgccgctgctggccgaggtcgggccgtacgccgaggtgacgcagggcgccttcggggactggcctgacttcccggtcggcttttggctc

SEQ ID NO: 1116 - protein, 42 aa, Streptomyces sp.
MLENTGTEDVYEPPLLAEVGPYAEVTQGAFGDWPDFPVGFWL

SEQ ID NO: 1117 - DNA, 222 bp, Actinobaculum sp.
  CDS (1)..(222)
atgtacgccactcttgtcgatttctattctctggagacaagcgtccgcaagacgctgaccgtcgcaaccgcgacggtcgagaaaaccatccaagaaaagaggaatatcatttctcaggatgtttacgaggctccggccatgctcaaggtcggcggcttcgacgagctcaccaacgccacccgcaggggctactgggttgacttcctgggcggttggtggttc

SEQ ID NO: 1118 - protein, 74 aa, Actinobaculum sp.
MYATLVDFYSLETSVRKTLTVATATVEKTIQEKRNIISQDVYEAPAMLKVGGFDELTNATRRGYWVDFLGGWWF

SEQ ID NO: 1119 - DNA, 105 bp, Kribbella catacumbae
  CDS (1)..(105)
atgcgtgagtacgagcgcccgacggtgatcgaggccggcgacttcggtcaggagaccgctggttccggtggccacaactgggagtggatcgacgcctggggttgg

SEQ ID NO: 1120 - protein, 35 aa, Kribbella catacumbae
MREYERPTVIEAGDFGQETAGSGGHNWEWIDAWGW

SEQ ID NO: 1121 - DNA, 93 bp, Streptomyces sp.; identical to SEQ ID NO: 541
  CDS (1)..(93)

SEQ ID NO: 1122 - protein, 31 aa, Streptomyces sp.; identical to SEQ ID NO: 542

SEQ ID NO: 1123 - DNA, 117 bp, Sphingobium lactosutens
  CDS (1)..(117)
atgctcgaagacgaagccatcgagctgggcatcgccagcgtcgagacgaaaggcaacggccttcgcgtcatcgacggcatctcgacgctgcagccgctcgccggcatttccgacgac

SEQ ID NO: 1124 - protein, 39 aa, Sphingobium lactosutens
MLEDEAIELGIASVETKGNGLRVIDGISTLQPLAGISDD

SEQ ID NO: 1125 - DNA, 147 bp, Streptomyces rubellomurinus
  CDS (1)..(147)
atggagaacacctccgtggagactctggagctccaggcctacgagacccccgaggtcttcgaggccggttccttcgccgaggacaccggcgcgctcggccttcacggcgccgagccgttcttcccgaccctgcacaccagctggtgg

SEQ ID NO: 1126 - protein, 49 aa, Streptomyces rubellomurinus
MENTSVETLELQAYETPEVFEAGSFAEDTGALGLHGAEPFFPTLHTSWW

SEQ ID NO: 1127 - DNA, 111 bp, Sphingomonas sp.
  CDS (1)..(111)
atgaaacgcctcgatctgggcggggtcatgcagcagaccaaaggcggggctatgtcggtcaacgacaaccagaacgggctgcgcccgatcttcggcgggctttccgccgac

SEQ ID NO: 1128 - protein, 37 aa, Sphingomonas sp.
MKRLDLGGVMQQTKGGAMSVNDNQNGLRPIFGGLSAD

SEQ ID NO: 1129 - DNA, 105 bp, Actinomadura oligospora
  CDS (1)..(105)
atggacacctacgagcgtcctacgttgacagagctcggcggtttcgaagaagagaccgacggagaaatgggaacactcctcgagttcatcctggaacgagactcc

SEQ ID NO: 1130 - protein, 35 aa, Actinomadura oligospora
MDTYERPTLTELGGFEEETDGEMGTLLEFILERDS

SEQ ID NO: 1131 - DNA, 141 bp, Streptomyces varsoviensis
  CDS (1)..(141)
atgagcgagacgctgcccatcgagcccgccgacgtccgcgagaccccgctgccggtcgagaccggcgagttcgtggaactcactcgggagcgagggggcgggacgcccgagggcaatggcccgcgcttccccttctggggg

SEQ ID NO: 1132 - protein, 47 aa, Streptomyces varsoviensis
MSETLPIEPADVRETPLPVETGEFVELTRERGGGTPEGNGPRFPFWG

SEQ ID NO: 1133 - DNA, 99 bp, Sphingobium yanoikuyae
  CDS (1)..(99)
atgatcgatctcggccacgcgagcgccgaaacgcagggcatcggcctggtcgatcgggacaaccccgccggtcagcagcagaccggcattctcgacgaa

SEQ ID NO: 1134 - protein, 33 aa, Sphingobium yanoikuyae
MIDLGHASAETQGIGLVDRDNPAGQQQTGILDE

SEQ ID NO: 1135 - DNA, 99 bp, Sphingobium yanoikuyae; identical to SEQ ID NO: 1133
  CDS (1)..(99)

SEQ ID NO: 1136 - protein, 33 aa, Sphingobium yanoikuyae; identical to SEQ ID NO: 1134

SEQ ID NO: 1137 - DNA, 117 bp, Streptomyces ruber; identical to SEQ ID NO: 1109
  CDS (1)..(117)

SEQ ID NO: 1138 - protein, 39 aa, Streptomyces ruber; identical to SEQ ID NO: 1110

SEQ ID NO: 1139 - DNA, 102 bp, Sphingobium yanoikuyae
  CDS (1)..(102)
atgcgcatcgaccttggtgcggcgaccgagcagacccagggcccgggcggcatcgacggggacgaattcctccagcaagaccgggtcggcctggccgacgac

SEQ ID NO: 1140 - protein, 34 aa, Sphingobium yanoikuyae
MRIDLGAATEQTQGPGGIDGDEFLQQDRVGLADD

SEQ ID NO: 1141 - DNA, 102 bp, Sphingobium yanoikuyae; identical to SEQ ID NO: 1139
  CDS (1)..(102)

SEQ ID NO: 1142 - protein, 34 aa, Sphingobium yanoikuyae; identical to SEQ ID NO: 1140

SEQ ID NO: 1143 - DNA, 138 bp, Sphingopyxis fribergensis
  CDS (1)..(138)
atggaacggaatgacgatcgtaacatcgacaagctgatcgaccttggttcggtggtcgccgaaacgaagggcggcgcgaacagcggcgatgacagcttccttcagcggcagcccaccggcatcggcctcgaggacgac

SEQ ID NO: 1144 - protein, 46 aa, Sphingopyxis fribergensis
MERNDDRNIDKLIDLGSVVAETKGGANSGDDSFLQRQPTGIGLEDD

SEQ ID NO: 1145 - DNA, 117 bp, Sphingomonas sp.
  CDS (1)..(117)
atggaacgcgataatgatctgatcgatctcggcaccgccagcatcgagaccaagggcccgcgcgggcccgagcccgatatcgggcttggcaaggtcccggccggcctcgccgacgac

SEQ ID NO: 1146 - protein, 39 aa, Sphingomonas sp.
MERDNDLIDLGTASIETKGPRGPEPDIGLGKVPAGLADD

SEQ ID NO: 1147 - DNA, 135 bp, Novosphingobium sp.
  CDS (1)..(135)
atgaatgaccgtgaccagaccgacaccgccctgatcgacctcggcgatgtcgccaccgtgacccgcggccaagcggtggcccggcaggatgccagcatcggccagcagagcttcgcgctcggcatcgtcgaagac

SEQ ID NO: 1148 - protein, 45 aa, Novosphingobium sp.
MNDRDQTDTALIDLGDVATVTRGQAVARQDASIGQQSFALGIVED

SEQ ID NO: 1149 - DNA, 174 bp, Streptomyces sp.
ttgctgcgcaataccgagaggaggcgaggaaacgtgcgcgaaagtggcgacatcgaacaggccgaggtgtacgagccgccggtgctggaggaggtcggcggcttcaccgagaagactgaaggctacagtggattcagttgggacggatggggcggattcctgcacttggggggg

SEQ ID NO: 1150 - protein, 58 aa, Streptomyces sp.
MLRNTERRRGNVRESGDIEQAEVYEPPVLEEVGGFTEKTEGYSGFSWDGWGGFLHLGG

SEQ ID NO: 1151 - DNA, 126 bp, Sphingopyxis sp.
  CDS (1)..(126)
atgaaccacgaacagaatgacgatctcatcgatctcggcgccgtcaccgaggaaaccaaaggtgtcggcgagattctgaccgacggcgtcggcggacagcttccccgcgccggtctttcggacgat

SEQ ID NO: 1152 - protein, 42 aa, Sphingopyxis sp.
MNHEQNDDLIDLGAVTEETKGVGEILTDGVGGQLPRAGLSDD

SEQ ID NO: 1153 - DNA, 117 bp, Brevundimonas sp.
  CDS (1)..(117)
atgaccagcaccgttcagatccgactgatcggcttcggacccgtcaccgccctcacccggggcgccatcgtcgggccgccgctggagatcgaagagacgccgttcgacggcgtggcc

SEQ ID NO: 1154 - protein, 39 aa, Brevundimonas sp.
MTSTVQIRLIGFGPVTALTRGAIVGPPLEIEETPFDGVA

SEQ ID NO: 1155 - DNA, 117 bp, Brevundimonas sp.
  CDS (1)..(117)
atgactggcatcgctcagatccgactgatcgacctcggtcccgtcactgttctgacgaggggcgcggtgatcggcccgcccgtcgaacacgaggaaatgccgtacgacggcggggcc

SEQ ID NO: 1156 - protein, 39 aa, Brevundimonas sp.
MTGIAQIRLIDLGPVTVLTRGAVIGPPVEHEEMPYDGGA

SEQ ID NO: 1157 - DNA, 141 bp, Asticcacaulis sp.
  CDS (1)..(141)
atgcgtaaccttacccaagaaaccgcagccgtcgcgccgatcgtgctgggcgttgccaccgaagtgaccaagggcaacggcaatcaggtcgaactcgacgacgaattcgaacagcgccagatccctggcctcaccgctaac

SEQ ID NO: 1158 - protein, 47 aa, Asticcacaulis sp.
MRNLTQETAAVAPIVLGVATEVTKGNGNQVELDDEFEQRQIPGLTAN

SEQ ID NO: 1159 - DNA, 117 bp, Brevundimonas sp.; identical to SEQ ID NO: 1153
  CDS (1)..(117)

SEQ ID NO: 1160 - protein, 39 aa, Brevundimonas sp.; identical to SEQ ID NO: 1154

SEQ ID NO: 1161 - DNA, 117 bp, Brevundimonas sp.; identical to SEQ ID NO: 1155
  CDS (1)..(117)

SEQ ID NO: 1162 - protein, 39 aa, Brevundimonas sp.; identical to SEQ ID NO: 1156

SEQ ID NO: 1163 - DNA, 147 bp, Streptomyces rubellomurinus; identical to SEQ ID NO: 1125
  CDS (1)..(147)

SEQ ID NO: 1164 - protein, 49 aa, Streptomyces rubellomurinus; identical to SEQ ID NO: 1126

SEQ ID NO: 1165 - DNA, 135 bp, Sphingobium yanoikuyae
  CDS (1)..(135)
atggaacgtgatgcacattcgcaggatatcgtcgatttgggagatgcagtcgaactcacccgcggcgttctgctgatcggccaggatgatggcaacggcacgctgtacaaggcttccggcatttccgacgaagac

SEQ ID NO: 1166 - protein, 45 aa, Sphingobium yanoikuyae
MERDAHSQDIVDLGDAVELTRGVLLIGQDDGNGTLYKASGISDED

SEQ ID NO: 1167 - DNA, 138 bp, Brevundimonas abyssalis
  CDS (1)..(138)
atgcaacgcaaaggaaccataagcgacaaggttatcgatctcggcgacgtcattgccgaaaccaagggcacgacggttgacgatatccaagaccaggacaacttcctccagcgccctgaggccggcctttccatcgat

SEQ ID NO: 1168 - protein, 46 aa, Brevundimonas abyssalis
MQRKGTISDKVIDLGDVIAETKGTTVDDIQDQDNFLQRPEAGLSID

SEQ ID NO: 1169 - DNA, 120 bp, Streptomyces sp.
  CDS (1)..(120)
atgaacgaccacgaggttgtcgagtacgaggcgcccgaaatgctgcccatcggcgagttctccgagctcacgatgtggtacggctgggccagcaacgacggtgagggcacggcgatcatc

SEQ ID NO: 1170 - protein, 40 aa, Streptomyces sp.
MNDHEVVEYEAPEMLPIGEFSELTMWYGWASNDGEGTAII

SEQ ID NO: 1171 - DNA, 135 bp, Sphingobium yanoikuyae; identical to SEQ ID NO: 1165
  CDS (1)..(135)

SEQ ID NO: 1172 - protein, 45 aa, Sphingobium yanoikuyae; identical to SEQ ID NO: 1166

SEQ ID NO: 1173 - DNA, 138 bp, Burkholderia gladioli
  CDS (1)..(138)
atgagcgccattatcaaaaagcttttccgcaatcgagcaagcaatcaagcacataggttcgacgtcgtctctgtaacacatggccagccgggatatcagaccatcgatttccgagtggtcactcgactcggcggcaga

SEQ ID NO: 1174 - protein, 46 aa, Burkholderia gladioli
MSAIIKKLFRNRASNQAHRFDVVSVTHGQPGYQTIDFRVVTRLGGR

SEQ ID NO: 1175 - DNA, 126 bp, Sphingobium japonicum
  CDS (1)..(126)
atggaacggcatatcgacaatgacggtctcatcgatctgggcgatgccacgatcgaaaccaagggaccgcctgctggtgccggcgacgtgatcggccagcagcgtctcgccggcatcaccgacgag

SEQ ID NO: 1176 - protein, 42 aa, Sphingobium japonicum
MERHIDNDGLIDLGDATIETKGPPAGAGDVIGQQRLAGITDE

SEQ ID NO: 1177 - DNA, 99 bp, Sphingobium yanoikuyae; identical to SEQ ID NO: 1133
  CDS (1)..(99)

SEQ ID NO: 1178 - protein, 33 aa, Sphingobium yanoikuyae; identical to SEQ ID NO: 1134

SEQ ID NO: 1179 - DNA, 165 bp, Actinobacteria bacterium
  CDS (1)..(165)
atgaccgagcagaccgccccgccgccctgcgcgacgaccacgtctgcgccgcccgtgtacgagccgccggtggtgacgccggtgggctcgttcggcgccgacacgctcggcgacgtgagcgttgggcagagcgacgactccgacgcgggccagtactacgcgccg

SEQ ID NO: 1180 - protein, 55 aa, Actinobacteria bacterium
MTEQTAPPPCATTTSAPPVYEPPVVTPVGSFGADTLGDVSVGQSDDSDAGQYYAP

SEQ ID NO: 1181 - DNA, 135 bp, Novosphingobium sp.
  CDS (1)..(135)
atgaatgaccgtgaccagaccgacaccgccctgatcgacctcggcgatgtcgccaccgtgacccgcggccaagcggtgggtcggcaggataccagcatcggccagctgaatttcatgctcggcatcgtcgaagac

SEQ ID NO: 1182 - protein, 45 aa, Novosphingobium sp.
MNDRDQTDTALIDLGDVATVTRGQAVGRQDTSIGQLNFMLGIVED

SEQ ID NO: 1183 - DNA, 165 bp, Actinobacteria bacterium; identical to SEQ ID NO: 1179
  CDS (1)..(165)

SEQ ID NO: 1184 - protein, 55 aa, Actinobacteria bacterium; identical to SEQ ID NO: 1180

SEQ ID NO: 1185 - DNA, 135 bp, Sphingobium yanoikuyae; identical to SEQ ID NO: 1165
  CDS (1)..(135)

SEQ ID NO: 1186 - protein, 45 aa, Sphingobium yanoikuyae; identical to SEQ ID NO: 1166

SEQ ID NO: 1187 - DNA, 147 bp, Streptomyces vitaminophilus
  CDS (1)..(147)
atggaacgggagacgcgcggggagacggccgaggtgtacgagcctccggtgctggtggggatcggggacttcgctgatgagacacaggggcagtggatcggtgccgagcccgacggaagttgggggcaccacttcactcccccgagc

SEQ ID NO: 1188 - protein, 49 aa, Streptomyces vitaminophilus
MERETRGETAEVYEPPVLVGIGDFADETQGQWIGAEPDGSWGHHFTPPS

SEQ ID NO: 1189 - DNA, 135 bp, Sphingobium yanoikuyae; identical to SEQ ID NO: 1165
  CDS (1)..(135)

SEQ ID NO: 1190 - protein, 45 aa, Sphingobium yanoikuyae; identical to SEQ ID NO: 1166

SEQ ID NO: 1191 - DNA, 135 bp, Erythrobacter citreus; identical to SEQ ID NO: 813
  CDS (1)..(135)

SEQ ID NO: 1192 - protein, 45 aa, Erythrobacter citreus; identical to SEQ ID NO: 814

SEQ ID NO: 1193 - DNA, 120 bp, Nocardia nova
  CDS (1)..(120)
atgcagaagaagcagaagtacagtacgccacgtcttgccaaggtcggttccttccggaaggataccggaaacctccggcgcggcattccggagccggtcatcgtaattccgctgggcgga

SEQ ID NO: 1194 - protein, 40 aa, Nocardia nova
MQKKQKYSTPRLAKVGSFRKDTGNLRRGIPEPVIVIPLGG

SEQ ID NO: 1195 - DNA, 144 bp, Nonomuraea candida
  CDS (1)..(144)
atgagtcacgaccgcatcaccaccgccgccccggccggctacgagccgcccgaggtccgggagctgggcgacttcaccgaagagacccaggcctatgccatgtacggaggcgactggcccttcccgcgccgttactaccggccg

SEQ ID NO: 1196 - protein, 48 aa, Nonomuraea candida
MSHDRITTAAPAGYEPPEVRELGDFTEETQAYAMYGGDWPFPRRYYRP

SEQ ID NO: 1197 - DNA, 120 bp, Nocardiopsis salina
  CDS (1)..(120)
atggacaagcctgtgtacgaaaccccgttcatcgatgaggccggcgacttcctggaggtcaccggggcgctcgtcaacagcggtgatgagacccacttccccggctggtggcgctctgtc

SEQ ID NO: 1198 - protein, 40 aa, Nocardiopsis salina
MDKPVYETPFIDEAGDFLEVTGALVNSGDETHFPGWWRSV

SEQ ID NO: 1199 - DNA, 135 bp, Novosphingobium sp.
  CDS (1)..(135)
atggaaaagcagaacgagcagctcgacgagcagttcatcgacctgggttcggtgacgagcgaaacccatggcaccggtggtccggtcgaagcagacgcgaacctcaatcgcctctcgaccggcatcctcgccgac

SEQ ID NO: 1200 - protein, 45 aa, Novosphingobium sp.
MEKQNEQLDEQFIDLGSVTSETHGTGGPVEADANLNRLSTGILAD

SEQ ID NO: 1201 - DNA, 120 bp, Streptomyces sp.; identical to SEQ ID NO: 1169
  CDS (1)..(120)

SEQ ID NO: 1202 - protein, 40 aa, Streptomyces sp.; identical to SEQ ID NO: 1170

SEQ ID NO: 1203 - DNA, 138 bp, Sphingobium sp.
  CDS (1)..(138)
atggaacggaacgacgatcacaacagcgattcgctgatcgatctcggctcggtcgtcgaggaaaccaagggtggtgccatgagcggccaggatggcttccttcagcgccaggccaccggcatcggcctcgaggacgac

SEQ ID NO: 1204 - protein, 46 aa, Sphingobium sp.
MERNDDHNSDSLIDLGSVVEETKGGAMSGQDGFLQRQATGIGLEDD

SEQ ID NO: 1205 - DNA, 222 bp, Actinobaculum sp.; identical to SEQ ID NO: 1117
  CDS (1)..(222)

SEQ ID NO: 1206 - protein, 74 aa, Actinobaculum sp.; identical to SEQ ID NO: 1118

SEQ ID NO: 1207 - DNA, 120 bp, Streptomyces katrae
  CDS (1)..(120)
atgaacgaccacgaggtcctcgagtacgaggcgcccgaaatgctgcccatcggcgagttctccgagctcacgatgtggtacggctgggccagcaacgacggtgagggcacggcgatcatc

SEQ ID NO: 1208 - protein, 40 aa, Streptomyces katrae
MNDHEVLEYEAPEMLPIGEFSELTMWYGWASNDGEGTAII

SEQ ID NO: 1209 - DNA, 120 bp, Phenylobacterium zucineum
  CDS (1)..(120)
atgaacacgcgtctgcacccgcccgtgtcgcggctcatctgcctcggcggcgccaaggcctcgaccaaccagggcgtcggcatccgtcaggagctgaaccccgacgagggcttcgacgac

SEQ ID NO: 1210 - protein, 40 aa, Phenylobacterium zucineum
MNTRLHPPVSRLICLGGAKASTNQGVGIRQELNPDEGFDD

SEQ ID NO: 1211 - DNA, 120 bp, Streptomyces sp.; identical to SEQ ID NO: 1169
  CDS (1)..(120)

SEQ ID NO: 1212 - protein, 40 aa, Streptomyces sp.; identical to SEQ ID NO: 1170

SEQ ID NO: 1213 - DNA, 132 bp, Sphingomonas sp.
  CDS (1)..(132)
atggaacgcgaacatgaagccgccgacaacggtgtgatcgaactggggatcgccagcgagatcacacaagggtccggggtccagcggatcgacaatccgcaaggccagcccctgatcggcatgctcgacgac

SEQ ID NO: 1214 - protein, 44 aa, Sphingomonas sp.
MEREHEAADNGVIELGIASEITQGSGVQRIDNPQGQPLIGMLDD

SEQ ID NO: 1215 - DNA, 135 bp, Novosphingobium sp.; identical to SEQ ID NO: 1199
  CDS (1)..(135)

SEQ ID NO: 1216 - protein, 45 aa, Novosphingobium sp.; identical to SEQ ID NO: 1200

SEQ ID NO: 1217 - DNA, 129 bp, Alpha proteobacterium
  CDS (1)..(129)
atgtccaatatcgaacatgacgaagatatcgtcgatctgggtgccgcttccgtcgaaacccagggcgccatccgtggcgtcctcgacctcaccggtggtcagctgaaccagatgggcatcgctgacgac

SEQ ID NO: 1218 - protein, 43 aa, Alpha proteobacterium
MSNIEHDEDIVDLGAASVETQGAIRGVLDLTGGQLNQMGIADD

SEQ ID NO: 1219 - DNA, 126 bp, Nonomuraea candida
  CDS (1)..(126)
atgcagacccagcccacccacgtcccgtacgagccgcccaccctgcggtcactcggccgcttcgccgaggtgactcacggctacccgctcggggacttcccggacagcctctactggtactactgg

SEQ ID NO: 1220 - protein, 42 aa, Nonomuraea candida
MQTQPTHVPYEPPTLRSLGRFAEVTHGYPLGDFPDSLYWYYW

SEQ ID NO: 1221 - DNA, 93 bp, Sanguibacter keddieii
  CDS (1)..(93)
atgctcatcccgctcggctcgttcgcggacctcacggctgggctcggacgactcctggctgaccgagtcatcccggtcggccggctggtccca

SEQ ID NO: 1222 - protein, 31 aa, Sanguibacter keddieii
MLIPLGSFADLTAGLGRLLADRVIPVGRLVP

SEQ ID NO: 1223 - DNA, 117 bp, Novosphingobium sp.
  CDS (1)..(117)
atggaccgtctacacgacatcatcgacctcggcgccgccagtgtcgagaccaagggcccgatcggcgaaggcagcgacctcgtcctgggccagaacccggcgggtctttccgacgac

SEQ ID NO: 1224 - protein, 39 aa, Novosphingobium sp.
MDRLHDIIDLGAASVETKGPIGEGSDLVLGQNPAGLSDD

SEQ ID NO: 1225 - DNA, 132 bp, Sphingobium sp.
  CDS (1)..(132)
atgaacaacatcaacgagcatgaagacagcgtcgtcgatctcggcgtcgcatcggtcgaaacgaagggcgcagcgctcgacgattccgacaatatcggcggccaggtccgccagctcggtatcgccgacgac

SEQ ID NO: 1226 - protein, 44 aa, Sphingobium sp.
MNNINEHEDSVVDLGVASVETKGAALDDSDNIGGQVRQLGIADD

SEQ ID NO: 1227 - DNA, 138 bp, Sphingomonas sp.
  CDS (1)..(138)
atggaacggaatgacgatcacaacatcgatgcgctgatcgatctcggcgtcgcgaccgaagccaccaagggcggccagtcggtcatcttcgataaccagaacggtcgggatctgaccggccccgggatcgccgacgac

SEQ ID NO: 1228 - protein, 46 aa, Sphingomonas sp.
MERNDDHNIDALIDLGVATEATKGGQSVIFDNQNGRDLTGPGIADD

SEQ ID NO: 1229 - DNA, 99 bp, Sphingobium sp.
  CDS (1)..(99)
atgatcgatctgggcggcgcgagcgccgaaacgcagggcattggcctggtcgatcaggacaatcccgctggtcagcagcagaccggcattctcgacgaa

SEQ ID NO: 1230 - protein, 33 aa, Sphingobium sp.
MIDLGGASAETQGIGLVDQDNPAGQQQTGILDE

SEQ ID NO: 1231 - DNA, 132 bp, Sphingobium sp.; identical to SEQ ID NO: 1225
  CDS (1)..(132)

SEQ ID NO: 1232 - protein, 44 aa, Sphingobium sp.; identical to SEQ ID NO: 1226

SEQ ID NO: 1233 - DNA, 135 bp, Haliangium ochraceum
  CDS (1)..(135)
atggcgaagaagaagacggacacgaaaaagaccttcttgcaggacctgggcaaggcgaccgaggagaccaaatccgacggcccgcccgagcgctacgacaacctggtgttccgcaccaagggaccgtatctcggc

SEQ ID NO: 1234 - protein, 45 aa, Haliangium ochraceum
MAKKKTDTKKTFLQDLGKATEETKSDGPPERYDNLVFRTKGPYLG

SEQ ID NO: 1235 - DNA, 120 bp, Brevundimonas diminuta
  CDS (1)..(120)
atgaacacgttcaaactccgcctcgtcagcttcggcagcgccaaggcgctgacgcgcgacggcatgggtgaggaattcatcgaagggctggttcgcgacagtctttacccgcccgccggc

SEQ ID NO: 1236 - protein, 40 aa, Brevundimonas diminuta
MNTFKLRLVSFGSAKALTRDGMGEEFIEGLVRDSLYPPAG

SEQ ID NO: 1237 - DNA, 108 bp, Streptomyces sp.; identical to SEQ ID NO: 619
  CDS (1)..(108)

SEQ ID NO: 1238 - protein, 36 aa, Streptomyces sp.; identical to SEQ ID NO: 620

SEQ ID NO: 1239 - DNA, 129 bp, Sphingomonas hengshuiensis
  CDS (1)..(129)
atggaccgcgaaaccatcgaacccatcgatctcatcgacctcggcgcagccagcgctgaaacccagggcgccctcgacggccagtatgacgtcgtcgggctgatcccgcgcgaaggcctgtcggacgac

SEQ ID NO: 1240 - protein, 43 aa, Sphingomonas hengshuiensis
MDRETIEPIDLIDLGAASAETQGALDGQYDVVGLIPREGLSDD

SEQ ID NO: 1241 - DNA, 120 bp, Sphingomonas hengshuiensis
  CDS (1)..(120)
atgaagaacgaagaggcgcaggctgtcgacccgatcggcctgggcgccgagaccctgggcagctgtaccggcatgttcgaggtggtcggattcgtcctgccgcaaggcctgtcggattac

SEQ ID NO: 1242 - protein, 40 aa, Sphingomonas hengshuiensis
MKNEEAQAVDPIGLGAETLGSCTGMFEVVGFVLPQGLSDY

SEQ ID NO: 1243 - DNA, 105 bp, Sphingomonas sp.
  CDS (1)..(105)
atggtcgagcttggtgcggtgagcaccgagaccaagggtggccaagtcgggatcaatgatttcgagcgaggtcttcagctcaccggcagcggtctcacggacgac

SEQ ID NO: 1244 - protein, 35 aa, Sphingomonas sp.
MVELGAVSTETKGGQVGINDFERGLQLTGSGLTDD

SEQ ID NO: 1245 - DNA, 129 bp, Unknown
  Description of Unknown: Sphingomonas-like bacterium sequence
  CDS (1)..(129)
atggatcgcatcgaagatcgcgacgacgacaccgtcgaactcggcagcgtcacccaggagaccaagggtcctccgggaatcaaccacgacacggtcggttcgctcccgggcggcggtctctcgcacgac

SEQ ID NO: 1246 - protein, 43 aa, Unknown
  Description of Unknown: Sphingomonas-like bacterium sequence
MDRIEDRDDDTVELGSVTQETKGPPGINHDTVGSLPGGGLSHD

SEQ ID NO: 1247 - DNA, 105 bp, Sphingomonas sp.; identical to SEQ ID NO: 1243
  CDS (1)..(105)

SEQ ID NO: 1248 - protein, 35 aa, Sphingomonas sp.; identical to SEQ ID NO: 1244

SEQ ID NO: 1249 - DNA, 129 bp, Actinoplanes sp.
  CDS (1)..(129)
atggcaccgaccacttaccagcgcccgacgctgaccaagggcggctcgttcgcccgcaagaccgccggcagcctcttcaccagctgccgcgaatcgttcgtgacccagaagccgaaggccgtctgcaac

SEQ ID NO: 1250 - protein, 43 aa, Actinoplanes sp.
MAPTTYQRPTLTKGGSFARKTAGSLFTSCRESFVTQKPKAVCN

SEQ ID NO: 1251 - DNA, 129 bp, Actinoplanes sp.; identical to SEQ ID NO: 1249
  CDS (1)..(129)

SEQ ID NO: 1252 - protein, 43 aa, Actinoplanes sp.; identical to SEQ ID NO: 1250

SEQ ID NO: 1253 - DNA, 99 bp, Sphingobium sp.
  CDS (1)..(99)
atgaccgaactggggatcgccagcgaggtgacccatggcgccggccaactgcgcatcgacaatccgcagggacagccgtcgttcggcactctcgacgac

SEQ ID NO: 1254 - protein, 33 aa, Sphingobium sp.
MTELGIASEVTHGAGQLRIDNPQGQPSFGTLDD

SEQ ID NO: 1255 - DNA, 120 bp, Sphingopyxis sp.
  CDS (1)..(120)
atgcaagattatgaagccatcgagacgcaggagctcggccaggtgagcagcgatacccagggcgataatggtcgcccgatcgaaggcgccggcctgcttcccgtcaccggcatcagcgac

SEQ ID NO: 1256 - protein, 40 aa, Sphingopyxis sp.
MQDYEAIETQELGQVSSDTQGDNGRPIEGAGLLPVTGISD

SEQ ID NO: 1257 - DNA, 120 bp, Streptomyces iakyrus
  CDS (1)..(120)
atgatcgagaacgagatcgttgaatacgaggcgcccgagatgctgcccgtcggcgagttctccgaactcaccatgtggtacggctgggccagcaatgacggtgagggcgtagccatcatc

SEQ ID NO: 1258 - protein, 40 aa, Streptomyces iakyrus
MIENEIVEYEAPEMLPVGEFSELTMWYGWASNDGEGVAII

SEQ ID NO: 1259 - DNA, 108 bp, Frankia sp.
  CDS (1)..(108)
atgaaggctatctacctccccccgcgactggaagatgccggcagcttcgccgcagtgacgaacggccgctggggctgggggcgtgactactcctggcggcgttttgcg

SEQ ID NO: 1260 - protein, 36 aa, Frankia sp.
MKAIYLPPRLEDAGSFAAVTNGRWGWGRDYSWRRFA

SEQ ID NO: 1261 - DNA, 138 bp, Sphingomonas paucimobilis
  CDS (1)..(138)
atgcgtgacgaagagacggtcggccagtccgacatcatcgaactgggttcggtcaccgaactgacccgtggtccttttggtgtccaggaggacattctcaccaaccaggccctgacgagcatgggcctcgccgacgaa

SEQ ID NO: 1262 - protein, 46 aa, Sphingomonas paucimobilis
MRDEETVGQSDIIELGSVTELTRGPFGVQEDILTNQALTSMGLADE

SEQ ID NO: 1263 - DNA, 108 bp, Frankia sp.; identical to SEQ ID NO: 1259
  CDS (1)..(108)

SEQ ID NO: 1264 - protein, 36 aa, Frankia sp.; identical to SEQ ID NO: 1260

SEQ ID NO: 1265 - DNA, 108 bp, Frankia sp.; identical to SEQ ID NO: 1259
  CDS (1)..(108)

SEQ ID NO: 1266 - protein, 36 aa, Frankia sp.; identical to SEQ ID NO: 1260

SEQ ID NO: 1267 - DNA, 108 bp, Frankia sp.; identical to SEQ ID NO: 1259
  CDS (1)..(108)

SEQ ID NO: 1268 - protein, 36 aa, Frankia sp.; identical to SEQ ID NO: 1260

SEQ ID NO: 1269 - DNA, 123 bp, Sphingomonas sp.
  CDS (1)..(123)
atgaccatccaggaccaactgatcgacctcggcgcggcaaccgccgaaacccagggcttcccgatccccgagaccgacatcgtcggcgtgggccttctggcggccggtctttccgacgaggat

SEQ ID NO: 1270 - protein, 41 aa, Sphingomonas sp.
MTIQDQLIDLGAATAETQGFPIPETDIVGVGLLAAGLSDED

SEQ ID NO: 1271 - DNA, 117 bp, Brevundimonas sp.
  CDS (1)..(117)
atgaagacgaccaaactgcgcctcgtcagcttcggcagcgccaaggctctgacgcgggacaacatccagggcgaagacaccgagatgggcgtgttcccccgcccgctggccctcggc

SEQ ID NO: 1272 - protein, 39 aa, Brevundimonas sp.
MKTTKLRLVSFGSAKALTRDNIQGEDTEMGVFPRPLALG

SEQ ID NO: 1273 - DNA, 117 bp, Brevundimonas diminuta
  CDS (1)..(117)
atgcctgcagcaaaactgatccgcctcatccgcctcggcgaggcgcgcaccctgacccgcggaggcgatgaacagggtgtcctggaaatcgacttcacccgcatcaagccgatgggc

SEQ ID NO: 1274 - protein, 39 aa, Brevundimonas diminuta
MPAAKLIRLIRLGEARTLTRGGDEQGVLEIDFTRIKPMG

SEQ ID NO: 1275 - DNA, 114 bp, Brevundimonas diminuta
  CDS (1)..(114)
atgttgaacgcaatctgcatccgcctggttcgtctgggcgacgcgcgtacgctgacccggggccagtggcaccagggcgtgctcgagctggacgccacctacatccgggcggac

SEQ ID NO: 1276 - protein, 38 aa, Brevundimonas diminuta
MLNAICIRLVRLGDARTLTRGQWHQGVLELDATYIRAD

SEQ ID NO: 1277 - DNA, 108 bp, Frankia sp.; identical to SEQ ID NO: 1259
  CDS (1)..(108)

SEQ ID NO: 1278 - protein, 36 aa, Frankia sp.; identical to SEQ ID NO: 1260

SEQ ID NO: 1279 - DNA, 126 bp, Propionibacterium acidifaciens
  CDS (1)..(126)
atgtacgagacgccggttctgacgaggatcgctgattttgccgacgccaccaatggcgcagggcatgcacccctgaaagacgtatgggggttccgtgcactggctgttgtctactggccatggtcc

SEQ ID NO: 1280 - protein, 42 aa, Propionibacterium acidifaciens
MYETPVLTRIADFADATNGAGHAPLKDVWGFRALAVVYWPWS

SEQ ID NO: 1281 - DNA, 108 bp, Frankia sp.; identical to SEQ ID NO: 1259
  CDS (1)..(108)

SEQ ID NO: 1282 - protein, 36 aa, Frankia sp.; identical to SEQ ID NO: 1260

SEQ ID NO: 1283 - DNA, 129 bp, Sphingopyxis macrogoltabida
  CDS (1)..(129)
atggaccgcaaggacatcgaggcgatcgaagagctgggcatcgccagcgtcgaaacccagggcgaggaattccccgtcccggaaatcggcggctacgacctgaagcagggcggcagcatctccgccgac

SEQ ID NO: 1284 - protein, 43 aa, Sphingopyxis macrogoltabida
MDRKDIEAIEELGIASVETQGEEFPVPEIGGYDLKQGGSISAD

SEQ ID NO: 1285 - DNA, 108 bp, Frankia sp.; identical to SEQ ID NO: 1259
  CDS (1)..(108)

SEQ ID NO: 1286 - protein, 36 aa, Frankia sp.; identical to SEQ ID NO: 1260

SEQ ID NO: 1287 - DNA, 114 bp, Brevundimonas sp.
  CDS (1)..(114)
atgaccaccaccagaatcgcgctcgtccgtctcggcagcgtccgggccctcacccaactcgagcccgaaggcccgttcgccgaactgggcgtcgaccgcagccggacaccgatc

SEQ ID NO: 1288 - protein, 38 aa, Brevundimonas sp.
MTTTRIALVRLGSVRALTQLEPEGPFAELGVDRSRTPI

SEQ ID NO: 1289 - DNA, 111 bp, Brevundimonas sp.
  CDS (1)..(111)
atgcagaacccagtgaccctgacccgcctcggcagcgcccgggacctcacccggcacgagccgttcggcgacttcgtcgagatcggcttgatgcgcagcaagacgccgatc

SEQ ID NO: 1290 - protein, 37 aa, Brevundimonas sp.
MQNPVTLTRLGSARDLTRHEPFGDFVEIGLMRSKTPI

SEQ ID NO: 1291 - DNA, 108 bp, Frankia sp.; identical to SEQ ID NO: 1259
  CDS (1)..(108)

SEQ ID NO: 1292 - protein, 36 aa, Frankia sp.; identical to SEQ ID NO: 1260

SEQ ID NO: 1293 - DNA, 114 bp, Brevundimonas bacteroides
  CDS (1)..(114)
atgaccacgctgatccgccttgtccgtctgggcgacgcccgtgccctcactcgcgacgccctgccgggcccgtatctggagatgggcatcttcccgagccgcacggtcgaaggc

SEQ ID NO: 1294 - protein, 38 aa, Brevundimonas bacteroides
MTTLIRLVRLGDARALTRDALPGPYLEMGIFPSRTVEG

SEQ ID NO: 1295 - DNA, 120 bp, Brevundimonas naejangsanensis
  CDS (1)..(120)
atgacgacctccaagctgcgcatcgtcagcctcggcagcgcccgggccctgacgcgcgacctcatcggcggggatttcactgaggtgaacatgaacgacagccgcgaaccgcctctcggc

SEQ ID NO: 1296 - protein, 40 aa, Brevundimonas naejangsanensis
MTTSKLRIVSLGSARALTRDLIGGDFTEVNMNDSREPPLG

SEQ ID NO: 1297 - DNA, 123 bp, Brevundimonas sp.
  CDS (1)..(123)
atgaagatccagaacgagacgcgcgtcctgcgtctgggggccgcccgtcggctgacccgggcgatcctgatgggaccgttcaccgaactgaacccggcccgtcactggacgatgccgccggaa

SEQ ID NO: 1298 - protein, 41 aa, Brevundimonas sp.
MKIQNETRVLRLGAARRLTRAILMGPFTELNPARHWTMPPE

SEQ ID NO: 1299 - DNA, 123 bp, Brevundimonas sp.
  CDS (1)..(123)
atgaccaagagcacctcgcgcctcgtgcgcctcgggtccgcccgcaccatgacccgtgcggtctcgcgcggcgaattcgacgagctgaatccggtgctgaagtacaccattccgcccagcgaa

SEQ ID NO: 1300 - protein, 41 aa, Brevundimonas sp.
MTKSTSRLVRLGSARTMTRAVSRGEFDELNPVLKYTIPPSE

SEQ ID NO: 1301 - DNA, 108 bp, Streptomyces sp.; identical to SEQ ID NO: 695
  CDS (1)..(108)

SEQ ID NO: 1302 - protein, 36 aa, Streptomyces sp.; identical to SEQ ID NO: 696

SEQ ID NO: 1303 - DNA, 108 bp, Kibdelosporangium aridum
  CDS (1)..(108)
atgcgcacatacgagcgtccgactctgcgggcctctggctccttcaccaagaagaccggtgtcggcagtcacggtccggctgacctcattgttctgtcccacaagaac

SEQ ID NO: 1304 - protein, 36 aa, Kibdelosporangium aridum
MRTYERPTLRASGSFTKKTGVGSHGPADLIVLSHKN

SEQ ID NO: 1305 - DNA, 120 bp, Sphingopyxis sp.
  CDS (1)..(120)
atggaccgcgaactcaatgagttgatcgaactcggcagcgttaccggcgacaccgcgggcagcgaagacgtcggcatcgaaacgaacggcaagttcaagccgctcggactcagccaggac

SEQ ID NO: 1306 - protein, 40 aa, Sphingopyxis sp.
MDRELNELIELGSVTGDTAGSEDVGIETNGKFKPLGLSQD

SEQ ID NO: 1307 - DNA, 120 bp, Sphingopyxis sp.
  CDS (1)..(120)
atggaacgcgataacgacacgctcgtcgaactcggctcggtctccggtgacaccgccggcgactggggcctgtatgtcgaagccggcggccgtatgccgacgcccggtctcgtccaggac

SEQ ID NO: 1308 - protein, 40 aa, Sphingopyxis sp.
MERDNDTLVELGSVSGDTAGDWGLYVEAGGRMPTPGLVQD

SEQ ID NO: 1309 - DNA, 120 bp, Sphingopyxis sp.; identical to SEQ ID NO: 1305
  CDS (1)..(120)

SEQ ID NO: 1310 - protein, 40 aa, Sphingopyxis sp.; identical to SEQ ID NO: 1306

SEQ ID NO: 1311 - DNA, 120 bp, Sphingopyxis sp.; identical to SEQ ID NO: 1307
  CDS (1)..(120)

SEQ ID NO: 1312 - protein, 40 aa, Sphingopyxis sp.; identical to SEQ ID NO: 1308

SEQ ID NO: 1313 - DNA, 141 bp, Candidatus Odyssella thessalonicensis
  CDS (1)..(141)
atggaaaatatcgaaatcaccacaaaaacatcaacagtcctagataccaatttggtggttgtcttagaagagagtgcatcttccctaactcaaggctgttgtgggggatggttagaacaatggggaggatactctcgcccg

SEQ ID NO: 1314 - protein, 47 aa, Candidatus Odyssella thessalonicensis
MENIEITTKTSTVLDTNLVVVLEESASSLTQGCCGGWLEQWGGYSRP

SEQ ID NO: 1315 - DNA, 141 bp, Candidatus Odyssella thessalonicensis
  CDS (1)..(141)
atggaaaatatcgaaattaccacagaaatatcagcaatcctagataccaatttgggggttgtcttagaagagagcgcatcttctctaacaagagggctggttggcacaggaaaagaaggtttttgtgttggttttaggtat

SEQ ID NO: 1316 - protein, 47 aa, Candidatus Odyssella thessalonicensis
MENIEITTEISAILDTNLGVVLEESASSLTRGLVGTGKEGFCVGFRY

SEQ ID NO: 1317 - DNA, 135 bp, Sphingopyxis macrogoltabida
  CDS (1)..(135)
atgaaaaaggaactcgactatcgcgacgacgagctgatcgatctcggtgcggtcaccgacgaaacccacggcggccctctcggcgctttccccgactcgcccgatccgcgggccccgctcgggatcatcgtcgat

SEQ ID NO: 1318 - protein, 45 aa, Sphingopyxis macrogoltabida
MKKELDYRDDELIDLGAVTDETHGGPLGAFPDSPDPRAPLGIIVD

SEQ ID NO: 1319 - DNA, 159 bp, Streptomyces roseochromogenus
  CDS (1)..(159)
atggaaatccagaaggtgctcacgaacgaggagcgggtggctgtcgaggagccggtcgcctacgagccgccgatggtcgcggaggccgggaggttcgcacacgacacgcgcggtggttacgggaagtacagggaagccggtatcggccgttttgaagcg

SEQ ID NO: 1320 - protein, 53 aa, Streptomyces roseochromogenus
MEIQKVLTNEERVAVEEPVAYEPPMVAEAGRFAHDTRGGYGKYREAGIGRFEA

SEQ ID NO: 1321 - DNA, 120 bp, Actinomyces naeslundii
  CDS (1)..(120)
atggacagcaaaacctatgagagcccgttcatcgtcggtctcgggaccttcaccgaggtgaccggattcggcatcggtggtcaggctgagggctggaaccccattgccgaccgcaagaac

SEQ ID NO: 1322 - protein, 40 aa, Actinomyces naeslundii
MDSKTYESPFIVGLGTFTEVTGFGIGGQAEGWNPIADRKN

SEQ ID NO: 1323 - DNA, 120 bp, Actinomyces naeslundii
  CDS (1)..(120)
atgcgcgacatctacaccactccggctatccactcccttggtggcttcaccacgcagactggtgagttcatcggtccgcacactgaggcaatcctgccgctcgaggaccactccaaggag

SEQ ID NO: 1324 - protein, 40 aa, Actinomyces naeslundii
MRDIYTTPAIHSLGGFTTQTGEFIGPHTEAILPLEDHSKE

SEQ ID NO: 1325 - DNA, 129 bp, Actinomyces naeslundii
gtgtcacccttggctgacgtttacacgactccgtgcgtcgtcgacctcggcgactttgttgagcagactggtgagttcatcggtccgcacactgaggcaatcctgccgctcgaggaccactccaaggag

SEQ ID NO: 1326 - protein, 43 aa, Actinomyces naeslundii
MSPLADVYTTPCVVDLGDFVEQTGEFIGPHTEAILPLEDHSKE

SEQ ID NO: 1327 - DNA, 138 bp, Novosphingobium sp.
  CDS (1)..(138)
atggaacgtatcgaacacaacgaagacatcatcgaactcggcgacgcgaccgtcgtcacccgcggcagccttgtcgtgggccagcccgactccgatcaggttctcaaccggatcggcgcgggcatcaccgacgaggat

SEQ ID NO: 1328 - protein, 46 aa, Novosphingobium sp.
MERIEHNEDIIELGDATVVTRGSLVVGQPDSDQVLNRIGAGITDED

SEQ ID NO: 1329 - DNA, 129 bp, Novosphingobium subterraneum
  CDS (1)..(129)
atggaacgcacgttcgatctcgtcgaggacgtcgaagacttgggcaccgccagcatcgaaacgctcggccctccgggagaccggatcgagttcggtgtgctcgcgcagctgccgggccttgatcgcgac

SEQ ID NO: 1330 - protein, 43 aa, Novosphingobium subterraneum
MERTFDLVEDVEDLGTASIETLGPPGDRIEFGVLAQLPGLDRD

SEQ ID NO: 1331 - DNA, 117 bp, Rhodococcus fascians
  CDS (1)..(117)
atgatcaaggattacgaatctcccgctgtcgtcgacctgggtagcttccaggacgagaccggtttcggcatcggtggccaggccgagggctggaacccgatcgcggatcgcaagaac

SEQ ID NO: 1332 - protein, 39 aa, Rhodococcus fascians
MIKDYESPAVVDLGSFQDETGFGIGGQAEGWNPIADRKN

SEQ ID NO: 1333 - DNA, 120 bp, Rhodococcus fascians
  CDS (1)..(120)
atgtcgaaggcatacgaaacacctgctgttgcagatctgggccgcttccaggacgagaccggagagttcatcggtccgcacaccgaggcaatcctgccgttcgaggatcactccaaggag

SEQ ID NO: 1334 - protein, 40 aa, Rhodococcus fascians
MSKAYETPAVADLGRFQDETGEFIGPHTEAILPFEDHSKE

SEQ ID NO: 1335 - DNA, 117 bp, Rhodococcus fascians
  CDS (1)..(117)
atgaccgaggattaccaagccccgaccatcgtcgacctgggtagcttccaggacgagacaggtttcggcatcggtggccaggccgagggctggaacccgatcgccgatcgcaagaac

SEQ ID NO: 1336 - protein, 39 aa, Rhodococcus fascians
MTEDYQAPTIVDLGSFQDETGFGIGGQAEGWNPIADRKN

SEQ ID NO: 1337 - DNA, 126 bp, Alpha proteobacterium
  CDS (1)..(126)
atgaccaccaagagcatctcgcgcctcgttcgcctgggcgccgcccgcaagctcacccgggccggcgtcctcggcgagttcatcgagctgaacccggccgagcgctacgacatcactgtcggcgcc

SEQ ID NO: 1338 - protein, 42 aa, Alpha proteobacterium
MTTKSISRLVRLGAARKLTRAGVLGEFIELNPAERYDITVGA

SEQ ID NO: 1339 - DNA, 168 bp, Streptomyces sp.
  CDS (1)..(168)
atgcgagggggacaggtgacacacaccacacagagggacgaccagccgcgggagacatacgagccgccgacgctcgccgaggccggcgacttcgcggaggtcacgctcggtgccatggacgggaacgtcgccgacggcgggccgtggccgaccagcgtggcctggggg

SEQ ID NO: 1340 - protein, 56 aa, Streptomyces sp.
MRGGQVTHTTQRDDQPRETYEPPTLAEAGDFAEVTLGAMDGNVADGGPWPTSVAWG

SEQ ID NO: 1341 - DNA, 117 bp, Rhodococcus fascians; identical to SEQ ID NO: 1335
  CDS (1)..(117)

SEQ ID NO: 1342 - protein, 39 aa, Rhodococcus fascians; identical to SEQ ID NO: 1336

SEQ ID NO: 1343 - DNA, 117 bp, Rhodococcus fascians; identical to SEQ ID NO: 1331
  CDS (1)..(117)

SEQ ID NO: 1344 - protein, 39 aa, Rhodococcus fascians; identical to SEQ ID NO: 1332

SEQ ID NO: 1345 - DNA, 120 bp, Rhodococcus fascians
  CDS (1)..(120)
atgtcgaagccatacgaaacacctgctgttgcggatctgggccgtttccaggacgagaccggagagttcatcggtccgcacaccgaagcgatcctgccgttcgaggatcactccaaggag

SEQ ID NO: 1346 - protein, 40 aa, Rhodococcus fascians
MSKPYETPAVADLGRFQDETGEFIGPHTEAILPFEDHSKE

SEQ ID NO: 1347 - DNA, 117 bp, Rhodococcus fascians; identical to SEQ ID NO: 1331
  CDS (1)..(117)

SEQ ID NO: 1348 - protein, 39 aa, Rhodococcus fascians; identical to SEQ ID NO: 1332

SEQ ID NO: 1349 - DNA, 120 bp, Rhodococcus fascians; identical to SEQ ID NO: 1345
  CDS (1)..(120)

SEQ ID NO: 1350 - protein, 40 aa, Rhodococcus fascians; identical to SEQ ID NO: 1346

SEQ ID NO: 1351 - DNA, 117 bp, Rhodococcus fascians; identical to SEQ ID NO: 1335
  CDS (1)..(117)

SEQ ID NO: 1352 - protein, 39 aa, Rhodococcus fascians; identical to SEQ ID NO: 1336

SEQ ID NO: 1353 - DNA, 126 bp, Streptococcus suis
  CDS (1)..(126)
atgtaccaaaaaccaactattacaaaaatcggtagctatcgaactttgacaaatggtgcaggtggtgcacgtgaacgtgatttacttggcttccgtgcgttgattgttattcactggccatggttg

SEQ ID NO: 1354 - protein, 42 aa, Streptococcus suis
MYQKPTITKIGSYRTLTNGAGGARERDLLGFRALIVIHWPWL

SEQ ID NO: 1355 - DNA, 126 bp, Brevundimonas sp.
  CDS (1)..(126)
atgaccaccaagagcatctcgcgcctcgttcgcctgggcgccgctcgccagctcacccgcgccaactcgcgcggcgaattcgacgagctgaatcccgtgctgaagtacacgattccgccgaccgaa

SEQ ID NO: 1356 - protein, 42 aa, Brevundimonas sp.
MTTKSISRLVRLGAARQLTRANSRGEFDELNPVLKYTIPPTE

SEQ ID NO: 1357 - DNA, 123 bp, Brevundimonas sp.
  CDS (1)..(123)
atgaagatccggaccgacgcgccgatcctgcgactgggggccgctcgccggctgacccgggccatcgcgatggggccgttcaccgaactgaatccggcccggcactggaccatgccgcccgaa

SEQ ID NO: 1358 - protein, 41 aa, Brevundimonas sp.
MKIRTDAPILRLGAARRLTRAIAMGPFTELNPARHWTMPPE

SEQ ID NO: 1359 - DNA, 138 bp, Sphingobium herbicidovorans
  CDS (1)..(138)
atgaaccacaatgacaccgtcgaagacggcatcgaagaactgggcgtcgccagcgtcgtcacgctcgggccggctccgccctatcccgaggatcatctcctcagcccgatccccgtcggcggcggcatctccgccgac

SEQ ID NO: 1360 - protein, 46 aa, Sphingobium herbicidovorans
MNHNDTVEDGIEELGVASVVTLGPAPPYPEDHLLSPIPVGGGISAD

SEQ ID NO: 1361 - DNA, 126 bp, Streptococcus suis; identical to SEQ ID NO: 1353
  CDS (1)..(126)

SEQ ID NO: 1362 - protein, 42 aa, Streptococcus suis; identical to SEQ ID NO: 1354

SEQ ID NO: 1363 - DNA, 126 bp, Streptococcus pseudopneumoniae
  CDS (1)..(126)
atgtaccaaaaaccaactattacaaaaatcggtagctatcgaactttgacaaatggtgcaggcactgcacgtgaacgtgatttacttggctttcgtgcgttgattgttattcactggccatggttg

SEQ ID NO: 1364 - protein, 42 aa, Streptococcus pseudopneumoniae
MYQKPTITKIGSYRTLTNGAGTARERDLLGFRALIVIHWPWL

SEQ ID NO: 1365 - DNA, 132 bp, Sphingopyxis sp.
  CDS (1)..(132)
atggaccgcatcgacaacgccgaaatcgaagaactgggcatcgccagcgtcgaaacgctcggcgggcttctgccctatcccgaggatggctcggtcatccacttcaagccggacggcgcgatcaccgccgac

SEQ ID NO: 1366 - protein, 44 aa, Sphingopyxis sp.
MDRIDNAEIEELGIASVETLGGLLPYPEDGSVIHFKPDGAITAD

SEQ ID NO: 1367 - DNA, 129 bp, Hyphomonas chukchiensis
  CDS (1)..(129)
atgaatacgcagacagacgaccatcttgacgatgatgcattcgagccgatcgaattgggatcggtgtcggaagagaccaagggccagccaaacggcctgatcgaactgttcggtcagaattcgcggaac

SEQ ID NO: 1368 - protein, 43 aa, Hyphomonas chukchiensis
MNTQTDDHLDDDAFEPIELGSVSEETKGQPNGLIELFGQNSRN

SEQ ID NO: 1369 - DNA, 126 bp, Streptococcus suis; identical to SEQ ID NO: 1353
  CDS (1)..(126)

SEQ ID NO: 1370 - protein, 42 aa, Streptococcus suis; identical to SEQ ID NO: 1354

SEQ ID NO: 1371 - DNA, 120 bp, Sphingopyxis macrogoltabida
  CDS (1)..(120)
atggatcgtgaaaccaatgacatcgtcgagctcggcagcgtcagcgtcgacacggcgggcgaagaccgggtcggaatcgaatccggcggcaaatatcagccgctcggcctgacccaggac

SEQ ID NO: 1372 - protein, 40 aa, Sphingopyxis macrogoltabida
MDRETNDIVELGSVSVDTAGEDRVGIESGGKYQPLGLTQD

SEQ ID NO: 1373 - DNA, 126 bp, Sphingopyxis macrogoltabida
  CDS (1)..(126)
atggaacgcgaactgcaaacggacgatctcgtcgaactcggcacagtcagcggcgacacggccggcgatttcggactgccgctcgaatccggcggccgcatgacccgccccggtcttgcccaggac

SEQ ID NO: 1374 - protein, 42 aa, Sphingopyxis macrogoltabida
MERELQTDDLVELGTVSGDTAGDFGLPLESGGRMTRPGLAQD

SEQ ID NO: 1375 - DNA, 135 bp, Actinobaculum sp.
ttggaggaggtgaatatcgtgacatacacgactcctaggattgagaagctcgccgattacagcaacgccactcgtggcggttcatggggtaacacccgtgatgtttggtggggcagatggtggaacttctggtac

SEQ ID NO: 1376 - protein, 45 aa, Actinobaculum sp.
MEEVNIVTYTTPRIEKLADYSNATRGGSWGNTRDVWWGRWWNFWY

SEQ ID NO: 1377 - DNA, 108 bp, Actinobaculum sp.
  CDS (1)..(108)
atgatcgagaagatcgccgactacagcgaggccactcgcggcgtttggttcggcgcctggcgggacattctcaaggcgaaggctccgttctacttcgatgccaagctc

SEQ ID NO: 1378 - protein, 36 aa, Actinobaculum sp.
MIEKIADYSEATRGVWFGAWRDILKAKAPFYFDAKL

SEQ ID NO: 1379 - DNA, 120 bp, Actinobaculum sp.
  CDS (1)..(120)
atggcatacaccacccccacgatcgagaagatcgccgactatactgaagctactcacggcatccggcggggacgttcctatgatttgaaccacgctagatttaccattgttaatctctgg

SEQ ID NO: 1380 - protein, 40 aa, Actinobaculum sp.
MAYTTPTIEKIADYTEATHGIRRGRSYDLNHARFTIVNLW

SEQ ID NO: 1381 - DNA, 111 bp, Actinobaculum sp.
  CDS (1)..(111)
atggcatacaccactccaacgattgaaaagctagctacctacagcgatgtcacccgtggagggccgcgaggctacttccgcgattggcaccatggaaggctgatctggctc

SEQ ID NO: 1382 - protein, 37 aa, Actinobaculum sp.
MAYTTPTIEKLATYSDVTRGGPRGYFRDWHHGRLIWL

SEQ ID NO: 1383 - DNA, 132 bp, Actinobaculum sp.
  CDS (1)..(132)
atgagaatatacattgcacctgcaatcgaaaaaatcgccgactaccacaagaccacgcgtggagccttctacggctccgtacgcgattggttcggcttgcggtggcgaggggcgggctcctcctcccacttc

SEQ ID NO: 1384 - protein, 44 aa, Actinobaculum sp.
MRIYIAPAIEKIADYHKTTRGAFYGSVRDWFGLRWRGAGSSSHF

SEQ ID NO: 1385 - DNA, 99 bp, Stenotrophomonas maltophilia
  CDS (1)..(99)
atgggtggcgaactgatcgagctgggctcggtggtttcggaaacgaaggcgcacaaccacggcacgttgtgggatggcgtgttcccgaccacgtcgccc

SEQ ID NO: 1386 - protein, 33 aa, Stenotrophomonas maltophilia
MGGELIELGSVVSETKAHNHGTLWDGVFPTTSP

SEQ ID NO: 1387 - DNA, 114 bp, Sphingomonas sp.
  CDS (1)..(114)
atgaagcaagaaacacgttccaagctgatccgtctcggcagtatccggcgtgataccaaggcgatcgtgacagccgggcagcaggaagaattcctgccgattctttcctacatg

SEQ ID NO: 1388 - protein, 38 aa, Sphingomonas sp.
MKQETRSKLIRLGSIRRDTKAIVTAGQQEEFLPILSYM

SEQ ID NO: 1389 - DNA, 99 bp, Stenotrophomonas maltophilia; identical to SEQ ID NO: 1385
  CDS (1)..(99)

SEQ ID NO: 1390 - protein, 33 aa, Stenotrophomonas maltophilia; identical to SEQ ID NO: 1386

SEQ ID NO: 1391 - DNA, 99 bp, Stenotrophomonas maltophilia; identical to SEQ ID NO: 1385
  CDS (1)..(99)

SEQ ID NO: 1392 - protein, 33 aa, Stenotrophomonas maltophilia; identical to SEQ ID NO: 1386

SEQ ID NO: 1393 - DNA, 126 bp, Streptococcus salivarius
  CDS (1)..(126)
atgtaccaaaaaccaactattacaaaaatcggtaactaccgtactttgacaaatggtgcaggtaaagcacgtgagcgcgatttgcttggctttagtgcgttgatcgttatccactggccttgggga

SEQ ID NO: 1394 - protein, 42 aa, Streptococcus salivarius
MYQKPTITKIGNYRTLTNGAGKARERDLLGFSALIVIHWPWG

SEQ ID NO: 1395 - DNA, 129 bp, Arthrobacter sp.
  CDS (1)..(129)
atgaaaagcaactattctgctccgcgtgtagcgcgggtgggttcgttccgtgaagtgacaaacggtgtttggttcggacgctggcgcgacatcttcggcggtcgggcattcgttaaggtcgacgtcggc

SEQ ID NO: 1396 - protein, 43 aa, Arthrobacter sp.
MKSNYSAPRVARVGSFREVTNGVWFGRWRDIFGGRAFVKVDVG

SEQ ID NO: 1397 - DNA, 93 bp, Sanguibacter keddieii; identical to SEQ ID NO: 1221
  CDS (1)..(93)

SEQ ID NO: 1398 - protein, 31 aa, Sanguibacter keddieii; identical to SEQ ID NO: 1222

SEQ ID NO: 1399 - DNA, 144 bp, Streptomyces roseoverticillatus
gtggatcccgtggacgagaagaagaccgtggacgagaagaagacctgcgaatcgcccgggctcgtcgagaccggcaccttcgaagaggacacgcagggccggcggggggacttccgggacggcccctccggccggcgcgaccgg

SEQ ID NO: 1400 - protein, 48 aa, Streptomyces roseoverticillatus
MDPVDEKKTVDEKKTCESPGLVETGTFEEDTQGRRGDFRDGPSGRRDR

SEQ ID NO: 1401 - DNA, 123 bp, Candidatus Paracaedibacter symbiosus
  CDS (1)..(123)
atggaaaatattgaaattaatgatactgagtatggaatcactttagaagcaagcgcttcaactttaactcaaggtaggctgggtggagacagcgagggaaattcccattatccattgcagaga

SEQ ID NO: 1402 - protein, 41 aa, Candidatus Paracaedibacter symbiosus
MENIEINDTEYGITLEASASTLTQGRLGGDSEGNSHYPLQR

SEQ ID NO: 1403 - DNA, 126 bp, Candidatus Paracaedibacter symbiosus
  CDS (1)..(126)
atggaaaatattgaaattaatgatactgagtatggaatcactttggtagcaagcgcttctactttaactcagggttccaaagggggcgacccctcagaaggttctggggcttattacacttatgtc

SEQ ID NO: 1404 - protein, 42 aa, Candidatus Paracaedibacter symbiosus
MENIEINDTEYGITLVASASTLTQGSKGGDPSEGSGAYYTYV

SEQ ID NO: 1405 - DNA, 99 bp, Stenotrophomonas maltophilia
  CDS (1)..(99)
atgggtggcgaaccgatcgagctgggctcggtggtttcggaaacgaaggcgcacaaccacggcacgttgtgggatggcgtgttcccgaccacgtcgccc

SEQ ID NO: 1406 - protein, 33 aa, Stenotrophomonas maltophilia
MGGEPIELGSVVSETKAHNHGTLWDGVFPTTSP

SEQ ID NO: 1407 - DNA, 159 bp, Stenotrophomonas maltophilia
  CDS (1)..(159)
atgaacgagctgattgagctgggtgtagtggcaggacagcagaaccctgaggatcagggtgtgggtggcgaactgatcgagctgggctcggtggtttcggaaacgaaggcgcacaaccacggcacgttgtgggatggcgtgttcccgaccacgtcgccc

SEQ ID NO: 1408 - protein, 53 aa, Stenotrophomonas maltophilia
MNELIELGVVAGQQNPEDQGVGGELIELGSVVSETKAHNHGTLWDGVFPTTSP

SEQ ID NO: 1409 - DNA, 144 bp, Hyphomonas oceanitis
  CDS (1)..(144)
atgaatacgcagacagacgaccatcttgacgatgatgcattcgagccgatcgaattgggatcggtgtcggaagagacccggggcggtttcaaccagggcgccgaattcgccgtggggccgaactcgcggctcatcccgatcggc

SEQ ID NO: 1410 - protein, 48 aa, Hyphomonas oceanitis
MNTQTDDHLDDDAFEPIELGSVSEETRGGFNQGAEFAVGPNSRLIPIG

SEQ ID NO: 1411 - DNA, 114 bp, Blastomonas sp.
  CDS (1)..(114)
atgaagaaggaaactcgttcgaagctgatccgtctgggcagtattcgtcgtgacaccaaggccatcgtgatcgctggccagcaggaagaattcctgccgattctctcgtacgcg

SEQ ID NO: 1412 - protein, 38 aa, Blastomonas sp.
MKKETRSKLIRLGSIRRDTKAIVIAGQQEEFLPILSYA

SEQ ID NO: 1413 - DNA, 135 bp, Hyphomonas sp.
  CDS (1)..(135)
atgaatacgcacacagatgatcatcttgaggatgacgccttcgagccagtcaacctcgggtcggtttccgaggaaacgcgcgggatcggccccctcggtgacgagttcaaccagggcagcgtcaacagccgcgaa

SEQ ID NO: 1414 - protein, 45 aa, Hyphomonas sp.
MNTHTDDHLEDDAFEPVNLGSVSEETRGIGPLGDEFNQGSVNSRE

SEQ ID NO: 1415 - DNA, 126 bp, Paenibacillus sp.
  CDS (1)..(126)
atgaaaaatgtttactccaaaccaacaatcgagaaagtagctggttttaaagagtctactaaaggattttttgccggtaagtggacagatgtttatggcggtaaggcttttgtacgcattgagttc

SEQ ID NO: 1416 - protein, 42 aa, Paenibacillus sp.
MKNVYSKPTIEKVAGFKESTKGFFAGKWTDVYGGKAFVRIEF

SEQ ID NO: 1417 - DNA, 135 bp, Enterococcus faecalis
  CDS (1)..(135)
atgacaaagcaaaattacagtaaaccatcaattgaaaaaattgcaggttttaaagaatctactcgtggtctttggacaggtaaatttagagatgtatttggtggacgcgctcttttccaagttgtaatttattac

SEQ ID NO: 1418 - protein, 45 aa, Enterococcus faecalis
MTKQNYSKPSIEKIAGFKESTRGLWTGKFRDVFGGRALFQVVIYY

SEQ ID NO: 1419 - DNA, 144 bp, Hyphomonas oceanitis; identical to SEQ ID NO: 1409
  CDS (1)..(144)

SEQ ID NO: 1420 - protein, 48 aa, Hyphomonas oceanitis; identical to SEQ ID NO: 1410

SEQ ID NO: 1421 - DNA, 141 bp, Hyphomonas atlantica
  CDS (1)..(141)
atggaacgcgatagatttgacccaaccgcattggaggagtctgacctgctggatctcggcagtgtctcggaagagacgaaaggtcgcttcatgcaacccttcgaattcggtgtctcaccgacttcccgcgatgaagccggc

SEQ ID NO: 1422 - protein, 47 aa, Hyphomonas atlantica
MERDRFDPTALEESDLLDLGSVSEETKGRFMQPFEFGVSPTSRDEAG

SEQ ID NO: 1423 - DNA, 135 bp, Enterococcus faecalis; identical to SEQ ID NO: 1417
  CDS (1)..(135)

SEQ ID NO: 1424 - protein, 45 aa, Enterococcus faecalis; identical to SEQ ID NO: 1418

SEQ ID NO: 1425 - DNA, 135 bp, Enterococcus faecalis; identical to SEQ ID NO: 1417
  CDS (1)..(135)

SEQ ID NO: 1426 - protein, 45 aa, Enterococcus faecalis; identical to SEQ ID NO: 1418

SEQ ID NO: 1427 - DNA, 135 bp, Enterococcus faecalis; identical to SEQ ID NO: 1417
  CDS (1)..(135)

SEQ ID NO: 1428 - protein, 45 aa, Enterococcus faecalis; identical to SEQ ID NO: 1418

SEQ ID NO: 1429 - DNA, 135 bp, Enterococcus faecalis; identical to SEQ ID NO: 1417
  CDS (1)..(135)

SEQ ID NO: 1430 - protein, 45 aa, Enterococcus faecalis; identical to SEQ ID NO: 1418

SEQ ID NO: 1431 - DNA, 135 bp, Enterococcus faecalis; identical to SEQ ID NO: 1417
  CDS (1)..(135)

SEQ ID NO: 1432 - protein, 45 aa, Enterococcus faecalis; identical to SEQ ID NO: 1418

SEQ ID NO: 1433 - DNA, 135 bp, Enterococcus faecalis; identical to SEQ ID NO: 1417
  CDS (1)..(135)

SEQ ID NO: 1434 - protein, 45 aa, Enterococcus faecalis; identical to SEQ ID NO: 1418

SEQ ID NO: 1435 - DNA, 135 bp, Enterococcus faecalis; identical to SEQ ID NO: 1417
  CDS (1)..(135)

SEQ ID NO: 1436 - protein, 45 aa, Enterococcus faecalis; identical to SEQ ID NO: 1418

SEQ ID NO: 1437 - DNA, 135 bp, Enterococcus faecalis; identical to SEQ ID NO: 1417
  CDS (1)..(135)

SEQ ID NO: 1438 - protein, 45 aa, Enterococcus faecalis; identical to SEQ ID NO: 1418

SEQ ID NO: 1439 - DNA, 135 bp, Enterococcus faecalis; identical to SEQ ID NO: 1417
  CDS (1)..(135)

SEQ ID NO: 1440 - protein, 45 aa, Enterococcus faecalis; identical to SEQ ID NO: 1418

SEQ ID NO: 1441 - DNA, 135 bp, Enterococcus faecalis; identical to SEQ ID NO: 1417
  CDS (1)..(135)

SEQ ID NO: 1442 - protein, 45 aa, Enterococcus faecalis; identical to SEQ ID NO: 1418

SEQ ID NO: 1443 - DNA, 156 bp, Xanthomonas pisi
  CDS (1)..(156)
atgaacgcattgatcgaactcggcttggcagaacagtccatccagcaggatcaggatgctggcagcgacctcatcgagctgggcgccgtggtgtctgaaacaaaggcgcacggccatggaacgttgtgggacggcatctttccgaccacgtctccg

SEQ ID NO: 1444 - protein, 52 aa, Xanthomonas pisi
MNALIELGLAEQSIQQDQDAGSDLIELGAVVSETKAHGHGTLWDGIFPTTSP

SEQ ID NO: 1445 - DNA, 117 bp, Sphingopyxis sp.
  CDS (1)..(117)
atggaacgcgagaatgacactgtcgaactgggctcggcgagcgccgacactctcggcaacttcggccctccggtcgagatcggcggccacgaactgcccgccggcattgacgtcgag

SEQ ID NO: 1446 - protein, 39 aa, Sphingopyxis sp.
MERENDTVELGSASADTLGNFGPPVEIGGHELPAGIDVE

SEQ ID NO: 1447 - DNA, 159 bp, Stenotrophomonas maltophilia
  CDS (1)..(159)
atgaacgagctgattgagctgggtgtagtggcaggacagcagaaccctgaaggccagggtgtgggcggtgatctgatcgagctgggctcggtggtttcggaaaccaaggcacacaaccacggcaccttgtgggatggcgtgttcccgaccacctcgccc

SEQ ID NO: 1448 - protein, 53 aa, Stenotrophomonas maltophilia
MNELIELGVVAGQQNPEGQGVGGDLIELGSVVSETKAHNHGTLWDGVFPTTSP

SEQ ID NO: 1449 - DNA, 132 bp, Actinobaculum sp.; identical to SEQ ID NO: 1383
  CDS (1)..(132)

SEQ ID NO: 1450 - protein, 44 aa, Actinobaculum sp.; identical to SEQ ID NO: 1384

SEQ ID NO: 1451 - DNA, 135 bp, Sphingobium xenophagum
  CDS (1)..(135)
atgaagacccagaacagcgagctgatcgatctcggcgccatcagcgtcgaaacccgcggcatcgaacctgtcggtccgcgcgatgaagacaccaacgagcattatctgttcgtcggcggcatcaccgctgaagac

SEQ ID NO: 1452 - protein, 45 aa, Sphingobium xenophagum
MKTQNSELIDLGAISVETRGIEPVGPRDEDTNEHYLFVGGITAED

SEQ ID NO: 1453 - DNA, 135 bp, Paenibacillus taiwanensis
  CDS (1)..(135)
atgacaaacgttgtttactccaaaccaacaattgagaaagtggctggctttaaagagtctactaaagggctttggactggtaaatacacagatgtttttggtggacgtgcattaattaaaatcataattcaaacc

SEQ ID NO: 1454 - protein, 45 aa, Paenibacillus taiwanensis
MTNVVYSKPTIEKVAGFKESTKGLWTGKYTDVFGGRALIKIIIQT

SEQ ID NO: 1455 - DNA, 132 bp, Actinobaculum sp.; identical to SEQ ID NO: 1383
  CDS (1)..(132)

SEQ ID NO: 1456 - protein, 44 aa, Actinobaculum sp.; identical to SEQ ID NO: 1384

SEQ ID NO: 1457 - DNA, 126 bp, Actinobaculum sp.
  CDS (1)..(126)
atggcaatatacactgctcccgcgattgagaagatcgctgactacagcgaagccacccgtggcggctggcggggccgttggaacgattactatggtggccgctatggcttgcgcattgttcccgtc

SEQ ID NO: 1458 - protein, 42 aa, Actinobaculum sp.
MAIYTAPAIEKIADYSEATRGGWRGRWNDYYGGRYGLRIVPV

SEQ ID NO: 1459 - DNA, 108 bp, Actinobaculum sp.; identical to SEQ ID NO: 1377
  CDS (1)..(108)

SEQ ID NO: 1460 - protein, 36 aa, Actinobaculum sp.; identical to SEQ ID NO: 1378

SEQ ID NO: 1461 - DNA, 126 bp, Actinobaculum sp.
  CDS (1)..(126)
atggcagaatacactgctcccgcgattgagaagatcgccgactacagcaaagtcacccgaggctccgctataggcgtgtggcgcgattactatggggctatgtatggatggacgcgcctacccctc

SEQ ID NO: 1462 - protein, 42 aa, Actinobaculum sp.
MAEYTAPAIEKIADYSKVTRGSAIGVWRDYYGAMYGWTRLPL

SEQ ID NO: 1463 - DNA, 129 bp, Paenarthrobacter nicotinovorans
  CDS (1)..(129)
atgaaaagcaactattctgctccgcgtgtagcgcgggtgggttcgttccgtgaagtgacaaacggtgtttggttcggacgctggcgcgacatcttcggcggtcgggcattcgttaaggtcgacatcggc

SEQ ID NO: 1464 - protein, 43 aa, Paenarthrobacter nicotinovorans
MKSNYSAPRVARVGSFREVTNGVWFGRWRDIFGGRAFVKVDIG

SEQ ID NO: 1465 - DNA, 147 bp, Sphingobium yanoikuyae
  CDS (1)..(147)
atgaaacagtcggttcaatccggttcgtccgatctgcgccccgcgaaccgtgcgatcgcgctgggcaaggcccgcaagctgacccgcgccagcttttcgggctcgcagccggagatgatcctcgaccgcgaatatacggtcggcggc

SEQ ID NO: 1466 - protein, 49 aa, Sphingobium yanoikuyae
MKQSVQSGSSDLRPANRAIALGKARKLTRASFSGSQPEMILDREYTVGG

SEQ ID NO: 1467 - DNA, 114 bp, Actinomyces sp.
  CDS (1)..(114)
atgatcgaagagatcgccgattacaccgacaccactcgggggtactacctcggttgggccgacgccttcggcggcggtttcggaggcggccgttggtaccccctgccctggtgg

SEQ ID NO: 1468 - protein, 38 aa, Actinomyces sp.
MIEEIADYTDTTRGYYLGWADAFGGGFGGGRWYPLPWW

SEQ ID NO: 1469 - DNA, 126 bp, Actinomyces sp.
  CDS (1)..(126)
atggctacttacgtttcccccgcgattgagcagatcgccgactacaccgacactacccgtggctggttgcacggaccgtggagggacattttcggcggtcgagcctttgtcagggtcacggtcgcg

SEQ ID NO: 1470 - protein, 42 aa, Actinomyces sp.
MATYVSPAIEQIADYTDTTRGWLHGPWRDIFGGRAFVRVTVA

SEQ ID NO: 1471 - DNA, 135 bp, Actinomyces sp.
  CDS (1)..(135)
atggctacttacgtttcccccgcaatcgagcagatcgccgactacaccgacactacccgtggctggtaccgcgggccctggacggacgttttcggcggccgcgccattgttaaggttgatgtcgcaaggccctgg

SEQ ID NO: 1472 - protein, 45 aa, Actinomyces sp.
MATYVSPAIEQIADYTDTTRGWYRGPWTDVFGGRAIVKVDVARPW

SEQ ID NO: 1473 - DNA, 117 bp, Actinomyces sp.
  CDS (1)..(117)
atggctacttacgtttcccccgcgatcgagcagatcgccgactacgccgaagcgacccgcggttggttctacggaccgctgcgtgactttatcggcgggcgaggacgcatcgtcctc

SEQ ID NO: 1474 - protein, 39 aa, Actinomyces sp.
MATYVSPAIEQIADYAEATRGWFYGPLRDFIGGRGRIVL

SEQ ID NO: 1475 - DNA, 138 bp, Actinomyces sp.
  CDS (1)..(138)
atggctacttacgtttcccccgcgattgagcagatcgccgactacaccgttgcgacccagggattcattcccggcccattccgtgacatcttcggcggccgcggcaacatcatcttctcaaacgggaacctctccagc

SEQ ID NO: 1476 - protein, 46 aa, Actinomyces sp.
MATYVSPAIEQIADYTVATQGFIPGPFRDIFGGRGNIIFSNGNLSS

SEQ ID NO: 1477 - DNA, 126 bp, Hyphomonas oceanitis
  CDS (1)..(126)
atgtatacgaattcagatgaccatcaggaagaattccttgatttgatcgaacttggctcagtctccgaagagacccgtgggcaacccaacgggctcattgagttcttcggccagagctcacgcgac

SEQ ID NO: 1478 - protein, 42 aa, Hyphomonas oceanitis
MYTNSDDHQEEFLDLIELGSVSEETRGQPNGLIEFFGQSSRD

SEQ ID NO: 1479 - DNA, 147 bp, Candidatus Odyssella thessalonicensis
  CDS (1)..(147)
atggtaaaaagttttttcaataaattagataaaaacgaacacgcaggccttataaatatatctcagtctgcatcaactatcactgctggaggttgtggagcgaaatttgagcaaggcggagtgacctcattgcaaaagtttgatgcc

SEQ ID NO: 1480 - protein, 49 aa, Candidatus Odyssella thessalonicensis
MVKSFFNKLDKNEHAGLINISQSASTITAGGCGAKFEQGGVTSLQKFDA

SEQ ID NO: 1481 - DNA, 123 bp, Paenibacillus alvei
  CDS (1)..(123)
atgacaaacgttgtttactctaaaccaacaattgagaaagttgctagttttaaagagtctactaaagggatttggtttggtagatacagagatgttcttggtggtcgtgctttaactagaata

SEQ ID NO: 1482 - protein, 41 aa, Paenibacillus alvei
MTNVVYSKPTIEKVASFKESTKGIWFGRYRDVLGGRALTRI

SEQ ID NO: 1483 - DNA, 150 bp, Stenotrophomonas maltophilia
  CDS (1)..(150)
atgaacgaactgattgagctgggcgtagtggctggtgagcagaatcacgaagatcagagtgaactgatcgagctgggctcggtggtttccgaaacgaaggcgcacaaccacggcacgttgtgggatggcgtcttcccgaccacctcgccc

SEQ ID NO: 1484 - protein, 50 aa, Stenotrophomonas maltophilia
MNELIELGVVAGEQNHEDQSELIELGSVVSETKAHNHGTLWDGVFPTTSP

SEQ ID NO: 1485 - DNA, 150 bp, Stenotrophomonas maltophilia; identical to SEQ ID NO: 1483
  CDS (1)..(150)

SEQ ID NO: 1486 - protein, 50 aa, Stenotrophomonas maltophilia; identical to SEQ ID NO: 1484

SEQ ID NO: 1487 - DNA, 150 bp, Stenotrophomonas maltophilia; identical to SEQ ID NO: 1483
  CDS (1)..(150)

SEQ ID NO: 1488 - protein, 50 aa, Stenotrophomonas maltophilia; identical to SEQ ID NO: 1484

SEQ ID NO: 1489 - DNA, 132 bp, Sphingomonas sp.
  CDS (1)..(132)
atgacggatcgtgaagaccgcaacgacgacgtgatcgatctcggccgcatggtcgacgagacgaagggcggcggcgtcagaaatgacgacgggctcggcctggagcaaatccaggcggggctgtccgacgat

SEQ ID NO: 1490 - protein, 44 aa, Sphingomonas sp.
MTDREDRNDDVIDLGRMVDETKGGGVRNDDGLGLEQIQAGLSDD

SEQ ID NO: 1491 - DNA, 150 bp, Stenotrophomonas maltophilia
  CDS (1)..(150)
atgaacgaactgattgagctgggcgtagtggctgttgagcagaatcacgaagatcagagtgaactgatcgagctgggctcggtggtttccgaaacgaaggcgcacaaccacggcacgttgtgggatggcgtcttcccgaccacctcgccc

SEQ ID NO: 1492 - protein, 50 aa, Stenotrophomonas maltophilia
MNELIELGVVAVEQNHEDQSELIELGSVVSETKAHNHGTLWDGVFPTTSP

SEQ ID NO: 1493 - DNA, 219 bp, Streptomyces sp.
  CDS (1)..(219)
atgaagcagcagcagacgaccgtcccggtctgcaccgcgcctgtcgtgctggacgtcggttccaccagggtcgtgagcggctggctcagccccgctggcgccccgccgtatgagccaccggccgcgacccgggtcggaacgctggtctcgctggctgccggaagctactccgagggccagcaggacgacggcgactaccacaccaccaagtggcacgcc

SEQ ID NO: 1494 - protein, 73 aa, Streptomyces sp.
MKQQQTTVPVCTAPVVLDVGSTRVVSGWLSPAGAPPYEPPAATRVGTLVSLAAGSYSEGQQDDGDYHTTKWHA

SEQ ID NO: 1495 - DNA, 150 bp, Stenotrophomonas maltophilia
  CDS (1)..(150)
atgaacgaactggttgagctgggcgtagtggctggagagcagaatcacgaagaccagggtgaactgatcgagctgggctcggtggtttccgaaacgaaggcgcacaaccacggcacgttgtgggatggcgtcttcccgaccacctcgccc

SEQ ID NO: 1496 - protein, 50 aa, Stenotrophomonas maltophilia
MNELVELGVVAGEQNHEDQGELIELGSVVSETKAHNHGTLWDGVFPTTSP

SEQ ID NO: 1497 - DNA, 150 bp, Stenotrophomonas maltophilia
  CDS (1)..(150)
atgaacgaactgattgagctgggcgtagtggctggagagcagaatcacgaagaccagggtgaactgatcgagctgggctcggtggtttccgaaacgaaggcgcacaaccacggcacgttgtgggatggcgtcttcccgaccacctcgccc

SEQ ID NO: 1498 - protein, 50 aa, Stenotrophomonas maltophilia
MNELIELGVVAGEQNHEDQGELIELGSVVSETKAHNHGTLWDGVFPTTSP

SEQ ID NO: 1499 - DNA, 150 bp, Stenotrophomonas maltophilia
  CDS (1)..(150)
atgaacgaactgattgagctgggcgtagtggctggagagcagaatcacgaagatccgagtgaactgatcgagctgggctcggtggtttccgaaacgaaggcgcacaaccacggcacgttgtgggatggcgtcttcccgaccacctcgccc

SEQ ID NO: 1500 - protein, 50 aa, Stenotrophomonas maltophilia
MNELIELGVVAGEQNHEDPSELIELGSVVSETKAHNHGTLWDGVFPTTSP

SEQ ID NO: 1501 - DNA, 165 bp, Streptomyces sp.
  CDS (1)..(165)
atgcaggacacgcacgaggtgccgaccgtccccgacatcaccggcaccaccgccaccgccaccgactacgagccgccgcagctcgtcgaggtgggcaacttcaccgagctgacgctcggctacaccggctaccactgggacggctgggccggcttcttcgggtgg

SEQ ID NO: 1502 - protein, 55 aa, Streptomyces sp.
MQDTHEVPTVPDITGTTATATDYEPPQLVEVGNFTELTLGYTGYHWDGWAGFFGW

SEQ ID NO: 1503 - DNA, 153 bp, Hyphomonas atlantica
  CDS (1)..(153)
atgaacagccccacacaatgcccacacacaccagcgccggacggcgagaccgagaccctgatcgatctcggcgcagcgtcggaagaaacccgcggccgcatcctgcagcccatggagttcggcgtctcgtttacctcccgcgatgaagccggc

SEQ ID NO: 1504 - protein, 51 aa, Hyphomonas atlantica
MNSPTQCPHTPAPDGETETLIDLGAASEETRGRILQPMEFGVSFTSRDEAG

SEQ ID NO: 1505 - DNA, 150 bp, Stenotrophomonas maltophilia; identical to SEQ ID NO: 1499
  CDS (1)..(150)

SEQ ID NO: 1506 - protein, 50 aa, Stenotrophomonas maltophilia; identical to SEQ ID NO: 1500

SEQ ID NO: 1507 - DNA, 150 bp, Stenotrophomonas maltophilia; identical to SEQ ID NO: 1483
  CDS (1)..(150)

SEQ ID NO: 1508 - protein, 50 aa, Stenotrophomonas maltophilia; identical to SEQ ID NO: 1484

SEQ ID NO: 1509 - DNA, 150 bp, Stenotrophomonas maltophilia; identical to SEQ ID NO: 1483
  CDS (1)..(150)

SEQ ID NO: 1510 - protein, 50 aa, Stenotrophomonas maltophilia; identical to SEQ ID NO: 1484

SEQ ID NO: 1511 - DNA, 138 bp, Cylindrospermum stagnale
  CDS (1)..(138)
atgacaacgctaaatccaacaaaaaaacagtactctcagcctgaaattattgagataggtgatgcagttagaacaactttaggtcatcatcgttggggacgtcgagaacaccaccgccgttactactaccgttggcac

SEQ ID NO: 1512 - protein, 46 aa, Cylindrospermum stagnale
MTTLNPTKKQYSQPEIIEIGDAVRTTLGHHRWGRREHHRRYYYRWH

SEQ ID NO: 1513 - DNA, 135 bp, Enterococcus faecalis; identical to SEQ ID NO: 1417
  CDS (1)..(135)

SEQ ID NO: 1514 - protein, 45 aa, Enterococcus faecalis; identical to SEQ ID NO: 1418

SEQ ID NO: 1515 - DNA, 99 bp, Robbsia andropogonis
  CDS (1)..(99)
atggaactacaaggcgtcgtcgcgacgcacgctacccaaggcttaatcggtctcgtgccggaaagcagcaccggctatttccttttcgagggaggccaa

SEQ ID NO: 1516 - protein, 33 aa, Robbsia andropogonis
MELQGVVATHATQGLIGLVPESSTGYFLFEGGQ

SEQ ID NO: 1517 - DNA, 96 bp, Robbsia andropogonis
  CDS (1)..(96)
atgcttgccccatcggacgtcgttggccttgccgcctgcggcgagacgcagggcggatccggtcaatacagggaagccggcgtcggtcgcttttta

SEQ ID NO: 1518 - protein, 32 aa, Robbsia andropogonis
MLAPSDVVGLAACGETQGGSGQYREAGVGRFL

SEQ ID NO: 1519 - DNA, 108 bp, Robbsia andropogonis
  CDS (1)..(108)
atggacgcacgttacctacaaggcgtcgtcgcgacccacgccacccaaggcttgatcggtctcgtgccggaaagtggccatggcctcttcttgttagaaggcagtcaa

SEQ ID NO: 1520 - protein, 36 aa, Robbsia andropogonis
MDARYLQGVVATHATQGLIGLVPESGHGLFLLEGSQ

SEQ ID NO: 1521 - DNA, 123 bp, Paenibacillus alvei; identical to SEQ ID NO: 1481
  CDS (1)..(123)

SEQ ID NO: 1522 - protein, 41 aa, Paenibacillus alvei; identical to SEQ ID NO: 1482

SEQ ID NO: 1523 - DNA, 129 bp, Hyphomonadaceae bacterium
  CDS (1)..(129)
atgaaacaggaaaagctgatcccggaagaattcgagcccgttgaactcggttccgtctcggaagaaacgcgcggttcgttcggactcgcccaggaaaacggcgaactgccgttcacccggcagatcgtc

SEQ ID NO: 1524 - protein, 43 aa, Hyphomonadaceae bacterium
MKQEKLIPEEFEPVELGSVSEETRGSFGLAQENGELPFTRQIV

SEQ ID NO: 1525 - DNA, 126 bp, Streptococcus sp.
  CDS (1)..(126)
atgaaatataataaacctatatttgaaaaagtagcaaactttaaaaaagatactaatggtctttggtttggtaagtttactgatatttttggtggtcgtgcagtatttcaaattgttattaattat

SEQ ID NO: 1526 - protein, 42 aa, Streptococcus sp.
MKYNKPIFEKVANFKKDTNGLWFGKFTDIFGGRAVFQIVINY

SEQ ID NO: 1527 - DNA, 141 bp, Hyphomonas sp.
  CDS (1)..(141)
atgaccccaacgaatgaaagaaatcagcctcaggacgaattcgagccgatcgaactcggttccgtttcttcggaaaccaagggtgaggttgctggccgggccgagctctccggttcgcagaactcccggccggaaatcggc

SEQ ID NO: 1528 - protein, 47 aa, Hyphomonas sp.
MTPTNERNQPQDEFEPIELGSVSSETKGEVAGRAELSGSQNSRPEIG

SEQ ID NO: 1529 - DNA, 111 bp, Hyphomonas jannaschiana
  CDS (1)..(111)
atggacgaattcgacccgatcgaactcggttccgtttcttcggaaaccaagggcgcagctgagggcccggccgagctctcaggctcgcagaattcccgccccggaattggt

SEQ ID NO: 1530 - protein, 37 aa, Hyphomonas jannaschiana
MDEFDPIELGSVSSETKGAAEGPAELSGSQNSRPGIG

SEQ ID NO: 1531 - DNA, 120 bp, Streptococcus suis
  CDS (1)..(120)
atgaattatacaaagccagttatagaaaaaatttctacttttaaaaatggtactgcaggattagttgcaggtagcttcagagatatatttggaggcagggctttatttttaattaaaata

SEQ ID NO: 1532 - protein, 40 aa, Streptococcus suis
MNYTKPVIEKISTFKNGTAGLVAGSFRDIFGGRALFLIKI

SEQ ID NO: 1533 - DNA, 126 bp, Streptococcus suis
  CDS (1)..(126)
atgaaatgttgcaagccaacatttgaatcaattgcaactttcaaaaaagacactaaaggtctatggactggtaagtttcgtgatgtctttggtggacgtgcacttataaaagttacagttgagttc

SEQ ID NO: 1534 - protein, 42 aa, Streptococcus suis
MKCCKPTFESIATFKKDTKGLWTGKFRDVFGGRALIKVTVEF

SEQ ID NO: 1535 - DNA, 102 bp, Allosalinactinospora lopnorensis
  CDS (1)..(102)
atggtggtcgaggtcggcgacttcaccgagatcacacggggtcagtacgcctccgaacacgccgacgacggtgacggcgccgggtactggtcacaaccagtc

SEQ ID NO: 1536 - protein, 34 aa, Allosalinactinospora lopnorensis
MVVEVGDFTEITRGQYASEHADDGDGAGYWSQPV

SEQ ID NO: 1537 - DNA, 120 bp, Streptococcus suis; identical to SEQ ID NO: 1531
  CDS (1)..(120)

SEQ ID NO: 1538 - protein, 40 aa, Streptococcus suis; identical to SEQ ID NO: 1532

SEQ ID NO: 1539 - DNA, 126 bp, Streptococcus suis; identical to SEQ ID NO: 1533
  CDS (1)..(126)

SEQ ID NO: 1540 - protein, 42 aa, Streptococcus suis; identical to SEQ ID NO: 1534

SEQ ID NO: 1541 - DNA, 141 bp, Rubidibacter lacunae
  CDS (1)..(141)
atgcagacttcaattgattcgaagaaacagtatcaggagccgcgcatcgtttgcgtaggtgatgcagtcaaaatgactcttagttttggtcagtctctcattagagacgctagatggcgttttccaattgacccctccgca

SEQ ID NO: 1542 - protein, 47 aa, Rubidibacter lacunae
MQTSIDSKKQYQEPRIVCVGDAVKMTLSFGQSLIRDARWRFPIDPSA

SEQ ID NO: 1543 - DNA, 90 bp, Unknown
  Description of Unknown: Sphingomonas-like bacterium sequence
  CDS (1)..(90)
atgcttggcaagattcggcgcgtgacccgcgcgtcggatcgtcccggtacgccggagctcggcaatcccgtgctgagctttcagatcggc

SEQ ID NO: 1544 - protein, 30 aa, Unknown
  Description of Unknown: Sphingomonas-like bacterium sequence
MLGKIRRVTRASDRPGTPELGNPVLSFQIG

SEQ ID NO: 1545 - DNA, 120 bp, Streptococcus suis; identical to SEQ ID NO: 1531
  CDS (1)..(120)

SEQ ID NO: 1546 - protein, 40 aa, Streptococcus suis; identical to SEQ ID NO: 1532

SEQ ID NO: 1547 - DNA, 126 bp, Streptococcus suis; identical to SEQ ID NO: 1533
  CDS (1)..(126)

SEQ ID NO: 1548 - protein, 42 aa, Streptococcus suis; identical to SEQ ID NO: 1534

SEQ ID NO: 1549 - DNA, 120 bp, Lactococcus garvieae
  CDS (1)..(120)
atgaattatacgaagccagttatagaaaaaatttctacttttaaaaacggtacagcaggattagttgcaggtagcttcagagatatatttggtggcagggctttatttttaattagaata

SEQ ID NO: 1550 - protein, 40 aa, Lactococcus garvieae
MNYTKPVIEKISTFKNGTAGLVAGSFRDIFGGRALFLIRI

SEQ ID NO: 1551 - DNA, 126 bp, Lactococcus garvieae
  CDS (1)..(126)
atgaaatattgcaaaccaacatttgaatcaattgcaactttcaaaaaagacactaaaggtctatggactggtaagtttcgtgatgtctttggtggacgtgcaattgtaagagttacaattgagttc

SEQ ID NO: 1552 - protein, 42 aa, Lactococcus garvieae
MKYCKPTFESIATFKKDTKGLWTGKFRDVFGGRAIVRVTIEF

SEQ ID NO: 1553 - DNA, 120 bp, Streptococcus suis; identical to SEQ ID NO: 1531
  CDS (1)..(120)

SEQ ID NO: 1554 - protein, 40 aa, Streptococcus suis; identical to SEQ ID NO: 1532

SEQ ID NO: 1555 - DNA, 126 bp, Streptococcus suis; identical to SEQ ID NO: 1533
  CDS (1)..(126)

SEQ ID NO: 1556 - protein, 42 aa, Streptococcus suis; identical to SEQ ID NO: 1534

SEQ ID NO: 1557 - DNA, 120 bp, Lactococcus garvieae; identical to SEQ ID NO: 1549
  CDS (1)..(120)

SEQ ID NO: 1558 - protein, 40 aa, Lactococcus garvieae; identical to SEQ ID NO: 1550

SEQ ID NO: 1559 - DNA, 126 bp, Streptococcus suis
  CDS (1)..(126)
atgaaatattgcaaaccaacatttgaatcaattgcaactttcaaaaaagacactaaaggtctatggactggtaagtttcgtgatgtctttggtggatgtgcaattgtaagagttacaattgagttc

SEQ ID NO: 1560 - protein, 42 aa, Streptococcus suis
MKYCKPTFESIATFKKDTKGLWTGKFRDVFGGCAIVRVTIEF

SEQ ID NO: 1561 - DNA, 126 bp, Fusobacterium necrophorum
  CDS (1)..(126)
atgaagtacagtaaacctactattgaaaaaattgctgatttcaaaaacgatactaatggtatctggtttggacgctttgttgacatctttggcggacgtgcagttgtgaaaatcactattcaatat

SEQ ID NO: 1562 - protein, 42 aa, Fusobacterium necrophorum
MKYSKPTIEKIADFKNDTNGIWFGRFVDIFGGRAVVKITIQY

SEQ ID NO: 1563 - DNA, 126 bp, Streptococcus pneumoniae
  CDS (1)..(126)
atgaaatattgcaaaccaacatttgaatcaattgcaactttcaaaaaagacactaaaggtctatggactggtaagtttcgtgatatctttggtggacgtgcaattgtaagaattagaattgagttt

SEQ ID NO: 1564 - protein, 42 aa, Streptococcus pneumoniae
MKYCKPTFESIATFKKDTKGLWTGKFRDIFGGRAIVRIRIEF

SEQ ID NO: 1565 - DNA, 126 bp, Streptococcus pneumoniae; identical to SEQ ID NO: 1563
  CDS (1)..(126)

SEQ ID NO: 1566 - protein, 42 aa, Streptococcus pneumoniae; identical to SEQ ID NO: 1564

SEQ ID NO: 1567 - DNA, 126 bp, Streptococcus pneumoniae; identical to SEQ ID NO: 1563
  CDS (1)..(126)

SEQ ID NO: 1568 - protein, 42 aa, Streptococcus pneumoniae; identical to SEQ ID NO: 1564

SEQ ID NO: 1569 - DNA, 126 bp, Streptococcus pneumoniae; identical to SEQ ID NO: 1563
  CDS (1)..(126)

SEQ ID NO: 1570 - protein, 42 aa, Streptococcus pneumoniae; identical to SEQ ID NO: 1564

SEQ ID NO: 1571 - DNA, 126 bp, Streptococcus pneumoniae; identical to SEQ ID NO: 1563
  CDS (1)..(126)

SEQ ID NO: 1572 - protein, 42 aa, Streptococcus pneumoniae; identical to SEQ ID NO: 1564

SEQ ID NO: 1573 - DNA, 120 bp, Lactococcus garvieae; identical to SEQ ID NO: 1549
  CDS (1)..(120)

SEQ ID NO: 1574 - protein, 40 aa, Lactococcus garvieae; identical to SEQ ID NO: 1550

SEQ ID NO: 1575 - DNA, 126 bp, Lactococcus garvieae; identical to SEQ ID NO: 1551
  CDS (1)..(126)

SEQ ID NO: 1576 - protein, 42 aa, Lactococcus garvieae; identical to SEQ ID NO: 1552

SEQ ID NO: 1577 - DNA, 126 bp, Streptococcus pneumoniae; identical to SEQ ID NO: 1563
  CDS (1)..(126)

SEQ ID NO: 1578 - protein, 42 aa, Streptococcus pneumoniae; identical to SEQ ID NO: 1564

SEQ ID NO: 1579 - DNA, 126 bp, Streptococcus pneumoniae
  CDS (1)..(126)
atgaaatattgcaaaccaacatttgaatcaattgcaactttcaaaaaagacactaaaagtctatggactggtaagtttcgtgatatctttggtggacgtgcaattgtaagaattagaattgagttt

SEQ ID NO: 1580 - protein, 42 aa, Streptococcus pneumoniae
MKYCKPTFESIATFKKDTKSLWTGKFRDIFGGRAIVRIRIEF

SEQ ID NO: 1581 - DNA, 120 bp, Streptococcus salivarius
  CDS (1)..(120)
atgaattatacgaagccagttatagagaaaatttctacttttaaaagtggtacttcaggattagtcgcaggtaggttcagagatatatttggtggcagggctttatttttaattagaata

SEQ ID NO: 1582 - protein, 40 aa, Streptococcus salivarius
MNYTKPVIEKISTFKSGTSGLVAGRFRDIFGGRALFLIRI

SEQ ID NO: 1583 - DNA, 126 bp, Streptococcus salivarius
  CDS (1)..(126)
atgaaatattgcaaaccaacatttgaaccaattgcaactttcaaaaaagacactaaaggtctatggactggtaattttcgtgatgtctttggtggacgtgcaatcgtaagagttaaaattgagttc

SEQ ID NO: 1584 - protein, 42 aa, Streptococcus salivarius
MKYCKPTFEPIATFKKDTKGLWTGNFRDVFGGRAIVRVKIEF

SEQ ID NO: 1585 - DNA, 126 bp, Ruminococcus flavefaciens
  CDS (1)..(126)
atgacatacaataagccaagctttgagaaggttgcttctttcaagaacagcacaatgggtctttggacaggtaagtggactgacattttcggtggtagagcaatcatcaagatcgaaatcggtttc

SEQ ID NO: 1586 - protein, 42 aa, Ruminococcus flavefaciens
MTYNKPSFEKVASFKNSTMGLWTGKWTDIFGGRAIIKIEIGF

SEQ ID NO: 1587 - DNA, 126 bp, Ruminococcus flavefaciens
  CDS (1)..(126)
atgacatacaataagccaagctttgagaaggttgcttctttcaagaataaaacaatgggcctttggttcggcaattttaaggatctcttcggcggaaagatatacattgctcttagtcctgcatgg

SEQ ID NO: 1588 - protein, 42 aa, Ruminococcus flavefaciens
MTYNKPSFEKVASFKNKTMGLWFGNFKDLFGGKIYIALSPAW

SEQ ID NO: 1589 - DNA, 123 bp, Ruminococcus flavefaciens
  CDS (1)..(123)
atgacatacaataagccaagcgttgaaaaggtcgcttcattcaaggataacacaatgggtctttggtacggtaaatttcgtgacattttcggtgctaaaacatactttaatttagcatggaat

SEQ ID NO: 1590 - protein, 41 aa, Ruminococcus flavefaciens
MTYNKPSVEKVASFKDNTMGLWYGKFRDIFGAKTYFNLAWN

SEQ ID NO: 1591 - DNA, 120 bp, Ruminococcus flavefaciens
  CDS (1)..(120)
atgacatacagcaagccaaaatttgaacaaattgcttctttcaagaaagatacactgggtattttatttggtaagaaattagacgttttcggttctaagggtatttttatttgggattta

SEQ ID NO: 1592 - protein, 40 aa, Ruminococcus flavefaciens
MTYSKPKFEQIASFKKDTLGILFGKKLDVFGSKGIFIWDL

SEQ ID NO: 1593 - DNA, 126 bp, Ruminococcus flavefaciens
  CDS (1)..(126)
atgacatacaataagccaagctttgagaaggttgcttctttcaagaacagcacaatgggtctttgtttcggtaaatggaatgacattttcggtggtagagcaatcatcaagatcgaaatcggtttc

SEQ ID NO: 1594 - protein, 42 aa, Ruminococcus flavefaciens
MTYNKPSFEKVASFKNSTMGLCFGKWNDIFGGRAIIKIEIGF

SEQ ID NO: 1595 - DNA, 120 bp, Ruminococcus flavefaciens
  CDS (1)..(120)
atgacatacaataagccaagctttgagaaggttgcttctttcaaggataacacaatgggtgtttggttcggtaagtggactgacattttcggtggtagagcattcattcacgttgaatgg

SEQ ID NO: 1596 - protein, 40 aa, Ruminococcus flavefaciens
MTYNKPSFEKVASFKDNTMGVWFGKWTDIFGGRAFIHVEW

SEQ ID NO: 1597 - DNA, 108 bp, Streptomyces sp.; identical to SEQ ID NO: 619
  CDS (1)..(108)

SEQ ID NO: 1598 - protein, 36 aa, Streptomyces sp.; identical to SEQ ID NO: 620

SEQ ID NO: 1599 - DNA, 126 bp, Ruminococcus albus
  CDS (1)..(126)
atgacatacaacaagcctagctttgagaagatttcttctttcaaggagagtacaatgggtgtttggttcggtaagttcaaggacattttcggtggtaaagccgttgttgaaatcgtaatttactat

SEQ ID NO: 1600 - protein, 42 aa, Ruminococcus albus
MTYNKPSFEKISSFKESTMGVWFGKFKDIFGGKAVVEIVIYY

SEQ ID NO: 1601 - DNA, 126 bp, Ruminococcus albus; identical to SEQ ID NO: 1599
  CDS (1)..(126)

SEQ ID NO: 1602 - protein, 42 aa, Ruminococcus albus; identical to SEQ ID NO: 1600

SEQ ID NO: 1603 - DNA, 126 bp, Bifidobacterium callitrichos
  CDS (1)..(126)
atgaaggattatgtgcctcctgtcgttgaggtcatcgcatcattcaaggaagcaaccaatggcgtatggttcggcaactatgtcgatgttggcggagccaaggccccgttcccttggggatcgaac

SEQ ID NO: 1604 - protein, 42 aa, Bifidobacterium callitrichos
MKDYVPPVVEVIASFKEATNGVWFGNYVDVGGAKAPFPWGSN

SEQ ID NO: 1605 - DNA, 126 bp, Bifidobacterium callitrichos; identical to SEQ ID NO: 1603
  CDS (1)..(126)

SEQ ID NO: 1606 - protein, 42 aa, Bifidobacterium callitrichos; identical to SEQ ID NO: 1604

SEQ ID NO: 1607 - DNA, 111 bp, Rothia aeria
  CDS (1)..(111)
atgtacaccaaagcaacgttcactaaaattacctctttccgggccgctactcatggatggtactgggggaatcgtcgtgatatttacggggccctccggtacgctaataag

SEQ ID NO: 1608 - protein, 37 aa, Rothia aeria
MYTKATFTKITSFRAATHGWYWGNRRDIYGALRYANK

SEQ ID NO: 1609 - DNA, 99 bp, Rothia aeria
  CDS (1)..(99)
atgaactcttttgcaaattgcactcatggcctcatatacgggaaataccgggatgttctctccggtgcccggcttgtgactcctcctgaagttgctcta

SEQ ID NO: 1610 - protein, 33 aa, Rothia aeria
MNSFANCTHGLIYGKYRDVLSGARLVTPPEVAL

SEQ ID NO: 1611 - DNA, 141 bp, Unknown
  Description of Unknown: Candidate division sequence
  CDS (1)..(141)
atgaaaaataataaacaacttcaaaaaaaagctgtgaaaaacgaagttaaagttactgatttgggaaaagtttcacttctcactttgggccgatgtacgaattcttcatgggaatgtcctcgtatgacgggtcctcgtttt

SEQ ID NO: 1612 - protein, 47 aa, Unknown
  Description of Unknown: Candidate division sequence
MKNNKQLQKKAVKNEVKVTDLGKVSLLTLGRCTNSSWECPRMTGPRF

SEQ ID NO: 1613 - DNA, 126 bp, Bifidobacterium longum
  CDS (1)..(126)
atgaaggattatgtacccccggccgttgaggtcatcgcatcattcaaggaagcaaccaatggcgtatggttcggcaactatgtcgatgttggcggcgccaaggccccgttcccttggggatcgaac

SEQ ID NO: 1614 - protein, 42 aa, Bifidobacterium longum
MKDYVPPAVEVIASFKEATNGVWFGNYVDVGGAKAPFPWGSN

SEQ ID NO: 1615 - DNA, 111 bp, Rothia aeria
  CDS (1)..(111)
atgtacaccaaagcaacgttcactaaaattacctctttccaggccgctactcatggatggtactgggggaatcgtcgtgatatttacggagccctccggtacgctaataag

SEQ ID NO: 1616 - protein, 37 aa, Rothia aeria
MYTKATFTKITSFQAATHGWYWGNRRDIYGALRYANK

SEQ ID NO: 1617 - DNA, 99 bp, Rothia aeria
  CDS (1)..(99)
atgaactcttttgcagattgcactcacggccttatatacgggaaataccgggatgttctctccggtgcccggcttgtgactccccctgaagttgctcta

SEQ ID NO: 1618 - protein, 33 aa, Rothia aeria
MNSFADCTHGLIYGKYRDVLSGARLVTPPEVAL

SEQ ID NO: 1619 - DNA, 111 bp, Rothia aeria; identical to SEQ ID NO: 1607
  CDS (1)..(111)

SEQ ID NO: 1620 - protein, 37 aa, Rothia aeria; identical to SEQ ID NO: 1608

SEQ ID NO: 1621 - DNA, 99 bp, Rothia aeria; identical to SEQ ID NO: 1609
  CDS (1)..(99)

SEQ ID NO: 1622 - protein, 33 aa, Rothia aeria; identical to SEQ ID NO: 1610

SEQ ID NO: 1623 - DNA, 129 bp, Nocardiopsis halophila
  CDS (1)..(129)
atggagcccgaggccgtcgtagtgccggacacctatgaaccgcccatggtggtggacatgggaccggtgcccgaagtgaccctcggcaagttcgccgaggactccaaggaccagaaccgctacttcgag

SEQ ID NO: 1624 - protein, 43 aa, Nocardiopsis halophila
MEPEAVVVPDTYEPPMVVDMGPVPEVTLGKFAEDSKDQNRYFE

SEQ ID NO: 1625 - DNA, 105 bp, Rothia dentocariosa
  CDS (1)..(105)
atgaaggtgaactcttttgcagattgcactcacggccttatatacgggaaataccgggatgttctctccggtgcccggcttgtgactcctcctgaagttgctcta

SEQ ID NO: 1626 - protein, 35 aa, Rothia dentocariosa
MKVNSFADCTHGLIYGKYRDVLSGARLVTPPEVAL

SEQ ID NO: 1627 - DNA, 96 bp, Rothia dentocariosa
  CDS (1)..(96)
atgttcactaaaattacttctttccaggccgctactcatggatggtactgggggaatcgtcgtgatatttacggagccctccggtacgctaataag

SEQ ID NO: 1628 - protein, 32 aa, Rothia dentocariosa
MFTKITSFQAATHGWYWGNRRDIYGALRYANK

SEQ ID NO: 1629 - DNA, 129 bp, Kitasatospora setae
  CDS (1)..(129)
atgcaggaactcaccccgctcgacggcgagccggagggggagaccgtggtcctcggcgacgcggcgctcctgaccaagggcagctcgaacaacagcgtcgaaggcaagcgctccccgtacgacgccggc

SEQ ID NO: 1630 - protein, 43 aa, Kitasatospora setae
MQELTPLDGEPEGETVVLGDAALLTKGSSNNSVEGKRSPYDAG

SEQ ID NO: 1631 - DNA, 126 bp, Bifidobacterium breve
  CDS (1)..(126)
atgaagcagtatatagcccctacggtggagaccatcgcttcgttccgcgaagccaccaatggcttatggttcggtaagtatgtcgatatcggcggagccaaggcaccgttcccttggggatcgaac

SEQ ID NO: 1632 - protein, 42 aa, Bifidobacterium breve
MKQYIAPTVETIASFREATNGLWFGKYVDIGGAKAPFPWGSN

SEQ ID NO: 1633 - DNA, 138 bp, Actinomyces sp.; identical to SEQ ID NO: 1475
  CDS (1)..(138)

SEQ ID NO: 1634 - protein, 46 aa, Actinomyces sp.; identical to SEQ ID NO: 1476

SEQ ID NO: 1635 - DNA, 114 bp, Actinomyces sp.; identical to SEQ ID NO: 1467
  CDS (1)..(114)

SEQ ID NO: 1636 - protein, 38 aa, Actinomyces sp.; identical to SEQ ID NO: 1468

SEQ ID NO: 1637 - DNA, 126 bp, Actinomyces sp.; identical to SEQ ID NO: 1469
  CDS (1)..(126)

SEQ ID NO: 1638 - protein, 42 aa, Actinomyces sp.; identical to SEQ ID NO: 1470

SEQ ID NO: 1639 - DNA, 135 bp, Actinomyces sp.; identical to SEQ ID NO: 1471
  CDS (1)..(135)

SEQ ID NO: 1640 - protein, 45 aa, Actinomyces sp.; identical to SEQ ID NO: 1472

SEQ ID NO: 1641 - DNA, 117 bp, Actinomyces sp.; identical to SEQ ID NO: 1473
  CDS (1)..(117)

SEQ ID NO: 1642 - protein, 39 aa, Actinomyces sp.; identical to SEQ ID NO: 1474

SEQ ID NO: 1643 - DNA, 126 bp, Bifidobacterium breve; identical to SEQ ID NO: 1631
  CDS (1)..(126)

SEQ ID NO: 1644 - protein, 42 aa, Bifidobacterium breve; identical to SEQ ID NO: 1632

SEQ ID NO: 1645 - DNA, 126 bp, Bifidobacterium callitrichos; identical to SEQ ID NO: 1603
  CDS (1)..(126)

SEQ ID NO: 1646 - protein, 42 aa, Bifidobacterium callitrichos; identical to SEQ ID NO: 1604

SEQ ID NO: 1647 - DNA, 141 bp, Burkholderia mallei; identical to SEQ ID NO: 47
  CDS (1)..(141)

SEQ ID NO: 1648 - protein, 47 aa, Burkholderia mallei; identical to SEQ ID NO: 48

SEQ ID NO: 1649 - DNA, 153 bp, Streptomyces sp.
  CDS (1)..(153)
atgaacgacccgaccgcacaccccgccacccccgtgtccccgacgaccgaacccgagctcgtcgacctcgtcgagctcggcggcctcatggccctgacccagggccagggcggcggccagagcgaggacaagcgtcgcgcctacaactgcgcc

SEQ ID NO: 1650 - protein, 51 aa, Streptomyces sp.
MNDPTAHPATPVSPTTEPELVDLVELGGLMALTQGQGGGQSEDKRRAYNCA

SEQ ID NO: 1651 - DNA, 138 bp, Nocardiopsis chromatogenes
  CDS (1)..(138)
atggagcccgagaccgcaggacccgcagaaccgccggacgcctacgagtcgcccatggtggtggacatggggtcggttccggaagcgacactcggcaagttcgccgaggacaccaaggaccagaaccgctacttcgag

SEQ ID NO: 1652 - protein, 46 aa, Nocardiopsis chromatogenes
MEPETAGPAEPPDAYESPMVVDMGSVPEATLGKFAEDTKDQNRYFE

SEQ ID NO: 1653 - DNA, 138 bp, Streptomyces celluloflavus
  CDS (1)..(138)
atgaagcacgctgagcggacgtccgaccagccgcagcaggtcgacgaagcacccgaggtgatcgtcctcgacaacgcggccgccctgacccagggcggatcgggcacgagcaccgaggacaagcgctaccagtacggc

SEQ ID NO: 1654 - protein, 46 aa, Streptomyces celluloflavus
MKHAERTSDQPQQVDEAPEVIVLDNAAALTQGGSGTSTEDKRYQYG

SEQ ID NO: 1655 - DNA, 120 bp, Amycolatopsis benzoatilytica
  CDS (1)..(120)
atggatgtggacacccagccctacgagccgccggagctgaccgacctcggcgaggtcaccgagttcaccctcggcaacgccgccgacgacacggctgacatgaacaccgcccgctactac

SEQ ID NO: 1656 - protein, 40 aa, Amycolatopsis benzoatilytica
MDVDTQPYEPPELTDLGEVTEFTLGNAADDTADMNTARYY

SEQ ID NO: 1657 - DNA, 114 bp, Allosalinactinospora lopnorensis
  CDS (1)..(114)
atgcaggtcgagacctacgagcctccgatggtgatcgaactgggagacgtccgcgagttgacgctcggctcggcggcgcacgacaccgccgacacgaacgtcgcccgctacaac

SEQ ID NO: 1658 - protein, 38 aa, Allosalinactinospora lopnorensis
MQVETYEPPMVIELGDVRELTLGSAAHDTADTNVARYN

SEQ ID NO: 1659 - DNA, 126 bp, Streptococcus pneumoniae; identical to SEQ ID NO: 1563
  CDS (1)..(126)

SEQ ID NO: 1660 - protein, 42 aa, Streptococcus pneumoniae; identical to SEQ ID NO: 1564

SEQ ID NO: 1661 - DNA, 219 bp, Streptomyces flavidovirens
  CDS (1)..(219)
atgaccttgctgagaaaatacgcccaacggtcggcggcccggctccggccctctgtttccgatactggtgctcagcaaccgcaaccactcgccgcggcggatctcgaccgcgacgactcttacgcccctccggtcgtggtcgatctcggtcatgtacgggaggtgactctcggaagctccagcagtggcaccgccgacgccaactcccattactactgg

SEQ ID NO: 1662 - protein, 73 aa, Streptomyces flavidovirens
MTLLRKYAQRSAARLRPSVSDTGAQQPQPLAAADLDRDDSYAPPVVVDLGHVREVTLGSSSSGTADANSHYYW

SEQ ID NO: 1663 - DNA, 123 bp, Citrobacter pasteurii
  CDS (1)..(123)
atgaaaaagcagacgtttgtacctaagaagttggtaaaagttggcaaagcgaccgaactaaccaaaggtggtgtaggtaagattattgaatactttattggcggcggcgttggtcgttatggt

SEQ ID NO: 1664 - protein, 41 aa, Citrobacter pasteurii
MKKQTFVPKKLVKVGKATELTKGGVGKIIEYFIGGGVGRYG

SEQ ID NO: 1665 - DNA, 144 bp, Streptomyces albus
  CDS (1)..(144)
atgaacgaccacaccgaggtcacgcagagcgccgagcctcgcccgagctacacctctccgcaactcatcgaactcgacgcggtgtcgaaggtgacgctcggcaagtacgccgaggacagcgccgaccagggccgctacttcgag

SEQ ID NO: 1666 - protein, 48 aa, Streptomyces albus
MNDHTEVTQSAEPRPSYTSPQLIELDAVSKVTLGKYAEDSADQGRYFE

SEQ ID NO: 1667 - DNA, 165 bp, Actinosynnema mirum
  CDS (1)..(165)
atggcgcttctgccggaacagtggaacgagcccccggagcacacgacggacgggaccccatcgggacacgacgcgcccgtgctgctgacctccatcggtgacatgtcctcggtgaccctcggccagggcaagggcagtgccgaggacaagcgccgggcctacaac

SEQ ID NO: 1668 - protein, 55 aa, Actinosynnema mirum
MALLPEQWNEPPEHTTDGTPSGHDAPVLLTSIGDMSSVTLGQGKGSAEDKRRAYN

SEQ ID NO: 1669 - DNA, 267 bp, Streptomyces lydicus
gtgttgccatcacggcccatccgggaccagaccccgcccccttgcggtcggcaaagcgaagtccgaccgtgcaggtgcggttgtcccactccatcgatagcagcggagaggaggaagaagttgactgaccacaacggtgagatacacacgacggcccacgctgaggacggcgagccgccagcggtgatcgtcctcggtgacgccgccacgctgacgcgaggcagtgatcagcaaggtatcgagaacaagcgcacaccctacgactgc

SEQ ID NO: 1670 - protein, 89 aa, Streptomyces lydicus
MLPSRPIRDQTPPPCGRQSEVRPCRCGCPTPSIAAERRKKLTDHNGEIHTTAHAEDGEPPAVIVLGDAATLTRGSDQQGIENKRTPYDC

SEQ ID NO: 1671 - DNA, 144 bp, Streptomyces albus; identical to SEQ ID NO: 1665
  CDS (1)..(144)

SEQ ID NO: 1672 - protein, 48 aa, Streptomyces albus; identical to SEQ ID NO: 1666

SEQ ID NO: 1673 - DNA, 126 bp, Kitasatospora setae
  CDS (1)..(126)
atgcaggaactcacccagctcgacggagaaccggaggaggagaccgtgctcctcggtgacgcggcgctcctgactaagggcagctcgaacaacagcgtggaagccaagcgctccccgtacgacgcc

SEQ ID NO: 1674 - protein, 42 aa, Kitasatospora setae
MQELTQLDGEPEEETVLLGDAALLTKGSSNNSVEAKRSPYDA

SEQ ID NO: 1675 - DNA, 267 bp, Streptomyces lydicus; identical to SEQ ID NO: 1669

SEQ ID NO: 1676 - protein, 89 aa, Streptomyces lydicus; identical to SEQ ID NO: 1670

SEQ ID NO: 1677 - DNA, 105 bp, Streptomyces niveus
  CDS (1)..(105)
atgttctacgaacccccggtggtcgtcgatctcggttctgtgcgggacgtgacgctggggagttccaccagcggtacggccgatgccaattcccagtactactgg

SEQ ID NO: 1678 - protein, 35 aa, Streptomyces niveus
MFYEPPVVVDLGSVRDVTLGSSTSGTADANSQYYW

SEQ ID NO: 1679 - DNA, 135 bp, Streptomyces sp.
  CDS (1)..(135)
atggacgacgtgtgcaccatcaccaccgcaggcgacgaggacgccgccgggctggtcgagatcggggacgcggccagcctcaccgagggccagggcggcggcaacagcgaggacaagcgtcgcgcctacaactcc

SEQ ID NO: 1680 - protein, 45 aa, Streptomyces sp.
MDDVCTITTAGDEDAAGLVEIGDAASLTEGQGGGNSEDKRRAYNS

SEQ ID NO: 1681 - DNA, 108 bp, Streptomyces bicolor; identical to SEQ ID NO: 723
  CDS (1)..(108)

SEQ ID NO: 1682 - protein, 36 aa, Streptomyces bicolor; identical to SEQ ID NO: 724

SEQ ID NO: 1683 - DNA, 144 bp, Streptomyces celluloflavus
  CDS (1)..(144)
atgtcgcagcagcacaccgcagcggacacggctaaggacgcagacccccttgccgctccgacggtcatcgttctgggcgacgctgccacgctgacgcgtggtagtgaccagaacagcaccgagtcgaagcagaacccgtacgac

SEQ ID NO: 1684 - protein, 48 aa, Streptomyces celluloflavus
MSQQHTAADTAKDADPLAAPTVIVLGDAATLTRGSDQNSTESKQNPYD

SEQ ID NO: 1685 - DNA, 126 bp, Streptomyces sp.
  CDS (1)..(126)
atggagaaccgctctcagctcgacaccgagccggaggaggaggtcgtgaccctggaggacgcgacgcgtctgacgaagggcaacaccaactccagcgtggagaacaagcgctcgccctacggggcc

SEQ ID NO: 1686 - protein, 42 aa, Streptomyces sp.
MENRSQLDTEPEEEVVTLEDATRLTKGNTNSSVENKRSPYGA

SEQ ID NO: 1687 - DNA, 141 bp, Frankia sp.; identical to SEQ ID NO: 869
  CDS (1)..(141)

SEQ ID NO: 1688 - protein, 47 aa, Frankia sp.; identical to SEQ ID NO: 870

SEQ ID NO: 1689 - DNA, 135 bp, Streptomyces sp.
  CDS (1)..(135)
atgaatgacctggtcgtcaccgaggacaccggcaacgaggacgatgtcgcgctggtccagatcggcgacgcggcggccctgacggaaggccagggcggcggtaacagcgaagacaagcgccgcgcctacaacagt

SEQ ID NO: 1690 - protein, 45 aa, Streptomyces sp.
MNDLVVTEDTGNEDDVALVQIGDAAALTEGQGGGNSEDKRRAYNS

SEQ ID NO: 1691 - DNA, 132 bp, Streptomyces griseoluteus
  CDS (1)..(132)
atgaacgaaccgctccgcaaggaggacatcccgacgcccgagccggacatggtcgatgtcggcgacatcgccgaactgaccgaggggcagggcggcggtcagtccgaggacaagcggcgcgcgtacaactgc

SEQ ID NO: 1692 - protein, 44 aa, Streptomyces griseoluteus
MNEPLRKEDIPTPEPDMVDVGDIAELTEGQGGGQSEDKRRAYNC

SEQ ID NO: 1693 - DNA, 201 bp, Streptomyces sp.
  CDS (1)..(201)
atgacctacgagcccattgccgtatccccgtacgaggatttcggatatccgcgacaagcggtgaaggccggggccgcgccctcccccgaggaaccggcggcctacgaaccgccgatggtggtcgacctggggcatgtccgtgaggtgacgctgggcagctcccccagcgggagtgccgacgccaatgcccagtactactac

SEQ ID NO: 1694 - protein, 67 aa, Streptomyces sp.
MTYEPIAVSPYEDFGYPRQAVKAGAAPSPEEPAAYEPPMVVDLGHVREVTLGSSPSGSADANAQYYY

SEQ ID NO: 1695 - DNA, 105 bp, Streptomyces niveus; identical to SEQ ID NO: 1677
  CDS (1)..(105)

SEQ ID NO: 1696 - protein, 35 aa, Streptomyces niveus; identical to SEQ ID NO: 1678

SEQ ID NO: 1697 - DNA, 144 bp, Streptomyces caatingaensis
  CDS (1)..(144)
atggagacgatcaaggccccggcctacatcgcgccggtggttctggacgccggttccgtcgccaaggtgacgctcggtaccgcgaacttcgacaccgacgacgacacccagtacaagacgagcaccaacgcgggcggcggtagc

SEQ ID NO: 1698 - protein, 48 aa, Streptomyces caatingaensis
METIKAPAYIAPVVLDAGSVAKVTLGTANFDTDDDTQYKTSTNAGGGS

SEQ ID NO: 1699 - DNA, 141 bp, Frankia sp.; identical to SEQ ID NO: 869
  CDS (1)..(141)

SEQ ID NO: 1700 - protein, 47 aa, Frankia sp.; identical to SEQ ID NO: 870

SEQ ID NO: 1701 - DNA, 138 bp, Amycolatopsis alba
  CDS (1)..(138)
atggaaaccgtgaacgaccaaccagagagcggtcagacgactgacgcgccggtgttgctggtcagcctcggcgaggcgtcggcggtgaccttggggcagggcaaaggcagctcggaggacaagcgacgggcctacaac

SEQ ID NO: 1702 - protein, 46 aa, Amycolatopsis alba
METVNDQPESGQTTDAPVLLVSLGEASAVTLGQGKGSSEDKRRAYN

SEQ ID NO: 1703 - DNA, 138 bp, Lechevalieria aerocolonigenes
  CDS (1)..(138)
atgaacaggtcaggtcagattcaggtggttgcagcgccggacgacgacccggagctgatggtcgagctcggcgacgtcgcggacctgacgctcggaggccctggggagggccgcgagaacaagcgccgcgaggtcggc

SEQ ID NO: 1704 - protein, 46 aa, Lechevalieria aerocolonigenes
MNRSGQIQVVAAPDDDPELMVELGDVADLTLGGPGEGRENKRREVG

SEQ ID NO: 1705 - DNA, 123 bp, Streptomyces hygroscopicus
  CDS (1)..(123)
atgggcgagaacaccaccccggtctaccaggcccccgtcgtcctcgacgccggcgccgtcgtcgtggtgacgctgggcaccaacaacttcgacaccgccgacgacaccgagtacaagaacgcc

SEQ ID NO: 1706 - protein, 41 aa, Streptomyces hygroscopicus
MGENTTPVYQAPVVLDAGAVVVVTLGTNNFDTADDTEYKNA

SEQ ID NO: 1707 - DNA, 132 bp, Streptomyces sp.
  CDS (1)..(132)
atgagcgaaacgcttcgcaaggaggacatcacggcgtccgagccggacacggtcgacatcggtgatgtcgccgagctgaccgaggggcagggcggagggcattccgaggacaagcggcgcgcgtacaactgc

SEQ ID NO: 1708 - protein, 44 aa, Streptomyces sp.
MSETLRKEDITASEPDTVDIGDVAELTEGQGGGHSEDKRRAYNC

SEQ ID NO: 1709 - DNA, 177 bp, Streptomyces flavochromogenes
  CDS (1)..(177)
atgaactctgcacaccagcaccgcgaccccgcacacgagaacgcctccgccgccgcggcggacgcgcgcgaccccgaactgctcctcgtcgacgccggatcggtgcgtgacgtcaccctcgggaactggtcgcacggccaccccgacgacacgcagcactggacgccgaccgacgac

SEQ ID NO: 1710 - protein, 59 aa, Streptomyces flavochromogenes
MNSAHQHRDPAHENASAAAADARDPELLLVDAGSVRDVTLGNWSHGHPDDTQHWTPTDD

SEQ ID NO: 1711 - DNA, 201 bp, Amycolatopsis mediterranei
gtgcggacagtgactggacgaagacggttcgccataacgtatcagggggcactcgtgaacgacgctgacgtcgacccgaacaccgtcctcatcgttcccgaggatggctacgagccaccggcggtattcgatttcggtccggtcttcaagaccacccgcgggaatggcaacggaagcgtggacaaaagcagccaggaagac

SEQ ID NO: 1712 - protein, 67 aa, Amycolatopsis mediterranei
MRTVTGRRRFAITYQGALVNDADVDPNTVLIVPEDGYEPPAVFDFGPVFKTTRGNGNGSVDKSSQED

SEQ ID NO: 1713 - DNA, 132 bp, Streptomyces sp.; identical to SEQ ID NO: 1707
  CDS (1)..(132)

SEQ ID NO: 1714 - protein, 44 aa, Streptomyces sp.; identical to SEQ ID NO: 1708

SEQ ID NO: 1715 - DNA, 156 bp, Actinopolyspora mortivallis
  CDS (1)..(156)
atggatggcgagatcgtggagtacccgcgtgatgatggtttcgagggcacgccactgcggtacgagacgcccgtgctggaagaggttggcgacgtggccatgctgaccaacggcacgtcgttcgatgacaccgctgaccgcaagcgctggtactac

SEQ ID NO: 1716 - protein, 52 aa, Actinopolyspora mortivallis
MDGEIVEYPRDDGFEGTPLRYETPVLEEVGDVAMLTNGTSFDDTADRKRWYY

SEQ ID NO: 1717 - DNA, 198 bp, Streptomyces glaucescens
  CDS (1)..(198)
atgttccatgagaaattgttcgagcagttgtccggctgcgctgccgatggcggaaacggaacgctcccggacgggccgcccccggaccaggacgccgcttatgtgtccccctccctcgtcgatctcggacacgtccgtgacctgacgttgggcagttccccgaacggcaacgccgacgccaacgcccagtactactgg

SEQ ID NO: 1718 - protein, 66 aa, Streptomyces glaucescens
MFHEKLFEQLSGCAADGGNGTLPDGPPPDQDAAYVSPSLVDLGHVRDLTLGSSPNGNADANAQYYW

SEQ ID NO: 1719 - DNA, 126 bp, Streptomyces ahygroscopicus
  CDS (1)..(126)
atgcccgagcagcagctgaacacattcgaggaggacgacgcggtgatcgtcgacctcggcgacgccgccaagctcaccgaaggccagggcggcggcaacagcgaggacaagcgccgcgcctacaac

SEQ ID NO: 1720 - protein, 42 aa, Streptomyces ahygroscopicus
MPEQQLNTFEEDDAVIVDLGDAAKLTEGQGGGNSEDKRRAYN

SEQ ID NO: 1721 - DNA, 207 bp, Unknown
  Description of Unknown: Uncultured bacterium sequence
  CDS (1)..(207)
atgaccttgctgagaaaatacgcccaacggtcggcggcccggccctctgattccgatactggtgctcagcaacatctcgccgcggcggatcccgaccgcgacgactcttacgcccccccggtcgtggtcgatctcggtcatgtacgggaggtgactctcggaagctccagcagtggcaccgccgacgccaactcccattactactgg

SEQ ID NO: 1722 - protein, 69 aa, Unknown
  Description of Unknown: Uncultured bacterium sequence
MTLLRKYAQRSAARPSDSDTGAQQHLAAADPDRDDSYAPPVVVDLGHVREVTLGSSSSGTADANSHYYW

SEQ ID NO: 1723 - DNA, 132 bp, Streptomyces sp.
  CDS (1)..(132)
atgaacccgcttcagaccacggagcacaccgacgagaacgacctgctccccgtcgagatcggtgaagcgaccgtgctcaccgagggccagggcggcggccagagcgaggacaagcgccgcgcctacaacagc

SEQ ID NO: 1724 - protein, 44 aa, Streptomyces sp.
MNPLQTTEHTDENDLLPVEIGEATVLTEGQGGGQSEDKRRAYNS

SEQ ID NO: 1725 - DNA, 132 bp, Streptomyces sp.; identical to SEQ ID NO: 1723
  CDS (1)..(132)

SEQ ID NO: 1726 - protein, 44 aa, Streptomyces sp.; identical to SEQ ID NO: 1724

SEQ ID NO: 1727 - DNA, 141 bp, Frankia sp.
  CDS (1)..(141)
atggtgacggttgacttccagccgcacgacggcccgacggaaaaggctccggtgctgctggtgagcctcggtgaggcgtcgatggtgacgctcggccagggcaagggcagcgcggaggacaagcggaaggcgtacaacagc

SEQ ID NO: 1728 - protein, 47 aa, Frankia sp.
MVTVDFQPHDGPTEKAPVLLVSLGEASMVTLGQGKGSAEDKRKAYNS

SEQ ID NO: 1729 - DNA, 111 bp, Nocardiopsis alkaliphila
  CDS (1)..(111)
atggaagaagcacgtgacgaggcaccggtcgtcatcgatctcggggacgcgaccgttctgacccagggcagcgacgaccagagtgtcgagagcaagcagtccccctatgac

SEQ ID NO: 1730 - protein, 37 aa, Nocardiopsis alkaliphila
MEEARDEAPVVIDLGDATVLTQGSDDQSVESKQSPYD

SEQ ID NO: 1731 - DNA, 150 bp, Kibdelosporangium sp.
gtgactgacgaccgggtcgaatcgcgccgcgacgatcagccgagtgagagtggttacgaacctcctgggatccatgatttcggcctggttcgggaagtcactcacggaagcaccggcggaagcggtgacgcgagcgcgcagaagttcgac

SEQ ID NO: 1732 - protein, 50 aa, Kibdelosporangium sp.
MTDDRVESRRDDQPSESGYEPPGIHDFGLVREVTHGSTGGSGDASAQKFD

SEQ ID NO: 1733 - DNA, 132 bp, Streptomyces sp.; identical to SEQ ID NO: 1723
  CDS (1)..(132)

SEQ ID NO: 1734 - protein, 44 aa, Streptomyces sp.; identical to SEQ ID NO: 1724

SEQ ID NO: 1735 - DNA, 135 bp, Streptomyces sp.
  CDS (1)..(135)
atgaacgtgaacgagcccgtcatcgtggccgacgaggacgacgacgtgaccgtgatcggcgacgcggcggccctcaccatgggcggccaggccgacggcggcgagggcaagcgccacgtgtactcgtacaccggc

SEQ ID NO: 1736 - protein, 45 aa, Streptomyces sp.
MNVNEPVIVADEDDDVTVIGDAAALTMGGQADGGEGKRHVYSYTG

SEQ ID NO: 1737 - DNA, 90 bp, Streptomyces sp.
  CDS (1)..(90)
atggtcgttgacctcggcgaactggtcgccctgaccctcggccagggcaagggcagcagcgaggacaagcgtcgcgcctacaaccaccac

SEQ ID NO: 1738 - protein, 30 aa, Streptomyces sp.
MVVDLGELVALTLGQGKGSSEDKRRAYNHH

SEQ ID NO: 1739 - DNA, 135 bp, Streptomyces albus
  CDS (1)..(135)
atggacagcctgctcagcaccgagaccgtcatctccgacgacgaactcctgccgatcgaggttggcggcaccgccgaactgaccgagggccagggcggaggccagagcgaggacaagcgacgcgcctacaactgc

SEQ ID NO: 1740 - protein, 45 aa, Streptomyces albus
MDSLLSTETVISDDELLPIEVGGTAELTEGQGGGQSEDKRRAYNC

SEQ ID NO: 1741 - DNA, 171 bp, Amycolatopsis nigrescens
  CDS (1)..(171)
atgaactttgcccaggtactccaggacaagccggtcaggccgcatgcgattaccgcgggggacgagcccgactacgaatcgccgttgctgatcgacctcgggcatgtccgggacgtcaccctcggcagttcgtccagcggcagcgccgacgcgaattcgcagtactactgg

SEQ ID NO: 1742 - protein, 57 aa, Amycolatopsis nigrescens
MNFAQVLQDKPVRPHAITAGDEPDYESPLLIDLGHVRDVTLGSSSSGSADANSQYYW

SEQ ID NO: 1743 - DNA, 144 bp, Rhodanobacter sp.; identical to SEQ ID NO: 519
  CDS (1)..(144)

SEQ ID NO: 1744 - protein, 48 aa, Rhodanobacter sp.; identical to SEQ ID NO: 520

SEQ ID NO: 1745 - DNA, 132 bp, Actinobacteria bacterium
  CDS (1)..(132)
atggacaccaccgacacgaccaccgagaccgagatctacaccgcgcccgtgctgagcgagctgggcaccgtcaccggggccaccctgggctcggccggcgcgaacaacgcggacgacacccagtactggcag

SEQ ID NO: 1746 - protein, 44 aa, Actinobacteria bacterium
MDTTDTTTETEIYTAPVLSELGTVTGATLGSAGANNADDTQYWQ

SEQ ID NO: 1747 - DNA, 126 bp, Nocardiopsis halotolerans
  CDS (1)..(126)
atggacaacgcgaaggctgaggatcaggagactcacgaggagctgttggtcgagctcggggacgccgccgaactgactctgggccaggggcgtgcccagaacgagaacaagcgcaacccctacaac

SEQ ID NO: 1748 - protein, 42 aa, Nocardiopsis halotolerans
MDNAKAEDQETHEELLVELGDAAELTLGQGRAQNENKRNPYN

SEQ ID NO: 1749 - DNA, 180 bp, Saccharothrix espanaensis
  CDS (1)..(180)
atgcgacggatccgcgcgcggtcgaccggcggaaatgacgcggcgaatgcgaattcaccggcagactcgggggacgcgcactacgagccccccgtcgtgatcgacatcggcgacgtgcggcgggtcaccctcggcagctcgtccagcggtaatgcggacgcgaattcccagtactactgg

SEQ ID NO: 1750 - protein, 60 aa, Saccharothrix espanaensis
MRRIRARSTGGNDAANANSPADSGDAHYEPPVVIDIGDVRRVTLGSSSSGNADANSQYYW

SEQ ID NO: 1751 - DNA, 114 bp, Streptomyces sp.
  CDS (1)..(114)
atgaagccggcgcaggtcgatgaccagccggacgtgatcaacctcggcgacgccgccacgctcacgcgtggcggtgaggaccagggcgtggagaacaagcgcgcaccgtacgac

SEQ ID NO: 1752 - protein, 38 aa, Streptomyces sp.
MKPAQVDDQPDVINLGDAATLTRGGEDQGVENKRAPYD

SEQ ID NO: 1753 - DNA, 132 bp, Actinobacteria bacterium; identical to SEQ ID NO: 1745
  CDS (1)..(132)

SEQ ID NO: 1754 - protein, 44 aa, Actinobacteria bacterium; identical to SEQ ID NO: 1746

SEQ ID NO: 1755 - DNA, 135 bp, Streptomyces albus; identical to SEQ ID NO: 1739
  CDS (1)..(135)

SEQ ID NO: 1756 - protein, 45 aa, Streptomyces albus; identical to SEQ ID NO: 1740

SEQ ID NO: 1757 - DNA, 135 bp, Kitasatospora sp.
  CDS (1)..(135)
atgaacgtgaacgagcccaccatcgcggccgacgaggacgacgacgtgaccgtgatcggcgacgccgcggccctcaccatgggcggcacctccgacggcggcgagggcaagcggcacgtgtaccagtacgccggc

SEQ ID NO: 1758 - protein, 45 aa, Kitasatospora sp.
MNVNEPTIAADEDDDVTVIGDAAALTMGGTSDGGEGKRHVYQYAG

SEQ ID NO: 1759 - DNA, 123 bp, Nocardiopsis alba
gtgaacgagaacaccccccagagctacgaggagcccgtcctgatcgacctgggcgacgcccgcgacctcacgctcggctccgctcaagaggacacggcggacctgaaccaggcccgctacaac

SEQ ID NO: 1760 - protein, 41 aa, Nocardiopsis alba
MNENTPQSYEEPVLIDLGDARDLTLGSAQEDTADLNQARYN

SEQ ID NO: 1761 - DNA, 180 bp, Saccharothrix espanaensis; identical to SEQ ID NO: 1749
  CDS (1)..(180)

SEQ ID NO: 1762 - protein, 60 aa, Saccharothrix espanaensis; identical to SEQ ID NO: 1750

SEQ ID NO: 1763 - DNA, 129 bp, Streptomyces sp.
  CDS (1)..(129)
atgaacgagatcatcaaggcgagcgaccccgacgagaacgaggagatcgtgcccctcggcgacgccgctgccctcacgaagggcagcaccagcgagagcatcgagaacaagcgctccccgtactccgcc

SEQ ID NO: 1764 - protein, 43 aa, Streptomyces sp.
MNEIIKASDPDENEEIVPLGDAAALTKGSTSESIENKRSPYSA

SEQ ID NO: 1765 - DNA, 162 bp, Streptomyces violaceusniger
  CDS (1)..(162)
atgaggacggatccgcccccgccgcgtgatcggcccgagggcgatggcccggccgtggccgtgagctacaccgcgccggtggtcgtcgaggtcggctcggtcgcgcagaccgtgcgcggcacccagtaccaggactcggccgacgacacgcagtacaagacc

SEQ ID NO: 1766 - protein, 54 aa, Streptomyces violaceusniger
MRTDPPPPRDRPEGDGPAVAVSYTAPVVVEVGSVAQTVRGTQYQDSADDTQYKT

SEQ ID NO: 1767 - DNA, 126 bp, Nocardiopsis dassonvillei
  CDS (1)..(126)
atggacaacacgaaggctgaggatcaggagactcacgaggagctgctggtcgaactcggggacgcggcagacctgacgctcggccagggccgggcccagaacgagaacaagcgcaacccctacaac

SEQ ID NO: 1768 - protein, 42 aa, Nocardiopsis dassonvillei
MDNTKAEDQETHEELLVELGDAADLTLGQGRAQNENKRNPYN

SEQ ID NO: 1769 - DNA, 108 bp, Altererythrobacter atlanticus
  CDS (1)..(108)
atggaacagctgggttcgttcgaaaccctgacccagggcggttcccagagcggctcgctcgactcgcagtatccgatcggtacgcccagcgaagtaggcgtgttctcc

SEQ ID NO: 1770 - protein, 36 aa, Altererythrobacter atlanticus
MEQLGSFETLTQGGSQSGSLDSQYPIGTPSEVGVFS

SEQ ID NO: 1771 - DNA, 141 bp, Sphingopyxis sp.
  CDS (1)..(141)
atgaatacaccccagaaactcgcctacaccaaacccgagctcgacgaagtcggttccttcgaggaagtgacgctcggcgcctcgaccggctccgccgtggacgggacgttcacgattgggcaaatcgcaaccttcctctcc

SEQ ID NO: 1772 - protein, 47 aa, Sphingopyxis sp.
MNTPQKLAYTKPELDEVGSFEEVTLGASTGSAVDGTFTIGQIATFLS

SEQ ID NO: 1773 - DNA, 144 bp, Thalassobius activus
  CDS (1)..(144)
atgaaaaaatcttatactgccccaacactaactccaaaaggtcgcgtcgaagaacttacacacgcgaacattccactgaacgttcgtctggacgcgccattctctggcggtgccggcagctcaacaactggcctgacctttaca

SEQ ID NO: 1774 - protein, 48 aa, Thalassobius activus
MKKSYTAPTLTPKGRVEELTHANIPLNVRLDAPFSGGAGSSTTGLTFT

SEQ ID NO: 1775 - DNA, 138 bp, Spirosoma spitsbergense
  CDS (1)..(138)
atgaaaacaaaggcagtacatatacaaatttcctcgcctaaaaaggcgtataagacacccaagcttaaagtactgggcaacgtaaaaaaactcaccttgaaagtcgggtcaaacgtcgatgggatgggcggtttccta

SEQ ID NO: 1776 - protein, 46 aa, Spirosoma spitsbergense
MKTKAVHIQISSPKKAYKTPKLKVLGNVKKLTLKVGSNVDGMGGFL

SEQ ID NO: 1777 - DNA, 144 bp, Spirosoma radiotolerans
  CDS (1)..(144)
atgactacaaagactgtacatatatcggctccggcgcccaaaaaagcctacaaaacgcccaagctaaaatcgctgggtagcgtcaaaaaactaactttgaagagtggatcggccaccgatggtttcggttcatttgcaacagcc

SEQ ID NO: 1778 - protein, 48 aa, Spirosoma radiotolerans
MTTKTVHISAPAPKKAYKTPKLKSLGSVKKLTLKSGSATDGFGSFATA

SEQ ID NO: 1779 - DNA, 117 bp, Streptomyces silvensis
  CDS (1)..(117)
atgaacgacgtctacgagccgcccgcgctggaagagatcggcggcttcgcggaactgacgatggccttcgggccgtgcgtcgagaacgactgggtgtggggcaccgcctggatctgc

SEQ ID NO: 1780 - protein, 39 aa, Streptomyces silvensis
MNDVYEPPALEEIGGFAELTMAFGPCVENDWVWGTAWIC

SEQ ID NO: 1781 - DNA, 126 bp, Paenibacillus polymyxa; identical to SEQ ID NO: 829
  CDS (1)..(126)

SEQ ID NO: 1782 - protein, 42 aa, Paenibacillus polymyxa; identical to SEQ ID NO: 830

SEQ ID NO: 1783 - DNA, 126 bp, Paenibacillus polymyxa; identical to SEQ ID NO: 829
  CDS (1)..(126)

SEQ ID NO: 1784 - protein, 42 aa, Paenibacillus polymyxa; identical to SEQ ID NO: 830

SEQ ID NO: 1785 - DNA, 126 bp, Paenibacillus sp.
  CDS (1)..(126)
atggcgaagcaagaatggcaagctcctgttctcgagacgctcgacgtcaaagaaacgatgtacggcaaaggcgtaacggaagtcgattcggtaaccatcaacgataaggatatttacgacccgagt

SEQ ID NO: 1786 - protein, 42 aa, Paenibacillus sp.
MAKQEWQAPVLETLDVKETMYGKGVTEVDSVTINDKDIYDPS

SEQ ID NO: 1787 - DNA, 144 bp, Spirosoma linguale
  CDS (1)..(144)
atgaaattaactaaaaaagatatatctgtttcggctccggcacgtaagagagcatacagcactccaaaactaaagtcactgggtaacgtgaaaaaactaacgctaaaaaccggttcgagcgttgatggcttcggctcttttggt

SEQ ID NO: 1788 - protein, 48 aa, Spirosoma linguale
MKLTKKDISVSAPARKRAYSTPKLKSLGNVKKLTLKTGSSVDGFGSFG

SEQ ID NO: 1789 - DNA, 108 bp, Brevundimonas nasdae
  CDS (1)..(108)
atgacctcgctgggttcgttcgaaaccctgacgcaaggcgcttcgcgcggctccgcgctcgacgccaccttcccgacgggcaccccgttcggcgatctgaccttctcc

SEQ ID NO: 1790 - protein, 36 aa, Brevundimonas nasdae
MTSLGSFETLTQGASRGSALDATFPTGTPFGDLTFS

SEQ ID NO: 1791 - DNA, 129 bp, Gorillibacterium sp.
  CDS (1)..(129)
atgaaaaaggaatggaaacaacccgaattggaaatcctcagcgttcaaatgacgatggccggtcctggcaaagccttcccggatagcttcattgaagacgaagacgaaaccgcccacctcaatcacagc

SEQ ID NO: 1792 - protein, 43 aa, Gorillibacterium sp.
MKKEWKQPELEILSVQMTMAGPGKAFPDSFIEDEDETAHLNHS

SEQ ID NO: 1793 - DNA, 126 bp, Leucobacter sp.
  CDS (1)..(126)
atgattaagtctcagtacatcgccccagtggtggaagaagtaggaacctttcatgaggccacgaacggtcagttcaacaagaggtacctcgacatcttcttcatgaccacgccttacacctggggc

SEQ ID NO: 1794 - protein, 42 aa, Leucobacter sp.
MIKSQYIAPVVEEVGTFHEATNGQFNKRYLDIFFMTTPYTWG

SEQ ID NO: 1795 - DNA, 108 bp, Streptomyces pactum; identical to SEQ ID NO: 645
  CDS (1)..(108)

SEQ ID NO: 1796 - protein, 36 aa, Streptomyces pactum; identical to SEQ ID NO: 646

SEQ ID NO: 1797 - DNA, 201 bp, Streptomyces prasinopilosus
  CDS (1)..(201)
atgactttcgactccctcgccgcatgtctgcgcgacgcggtcagacgcgaacggcgtcgcacgcgatccggcgcggcgccctcaccgagcgggccgccggcccacgcgtcccccctgctggtcgacctcgggcacgtccgcgaggtgacgctcggcagctcgcccagtggcagcgccgacgccaacgcccagtactactgg

SEQ ID NO: 1798 - protein, 67 aa, Streptomyces prasinopilosus
MTFDSLAACLRDAVRRERRRTRSGAAPSPSGPPAHASPLLVDLGHVREVTLGSSPSGSADANAQYYW

SEQ ID NO: 1799 - DNA, 132 bp, Streptomyces hirsutus
  CDS (1)..(132)
atggaccactccaccactcaggtcacccccgtctaccaggccccggtcgtgctggacgccggcgtcgtcgtcacggtgacgctgggcaccaacaacttcgacaccgccgacgacaccgagtacaagaacgcc

SEQ ID NO: 1800 - protein, 44 aa, Streptomyces hirsutus
MDHSTTQVTPVYQAPVVLDAGVVVTVTLGTNNFDTADDTEYKNA

SEQ ID NO: 1801 - DNA, 201 bp, Streptomyces prasinus
  CDS (1)..(201)
atgactttcgactccctcgccgcatatctgcgcgacgcggtcagacgtgaacgtcgtcgcacgcgatccggcgcggcgccctcaccgagcgggccgccggcccacgagtcccccctgctggtcgacctcgggcacgtccgcgaggtgacgctcggcagctcgcccagtggcagcgccgacgccaacgcccagtactactgg

SEQ ID NO: 1802 - protein, 67 aa, Streptomyces prasinus
MTFDSLAAYLRDAVRRERRRTRSGAAPSPSGPPAHESPLLVDLGHVREVTLGSSPSGSADANAQYYW

SEQ ID NO: 1803 - DNA, 201 bp, Streptomyces prasinus; identical to SEQ ID NO: 1801
  CDS (1)..(201)

SEQ ID NO: 1804 - protein, 67 aa, Streptomyces prasinus; identical to SEQ ID NO: 1802

SEQ ID NO: 1805 - DNA, 132 bp, Streptomyces kanamyceticus
  CDS (1)..(132)
atggaatcacaggttcacgaggtactccctgagccgtacgagccgccggcgctgattgaagtcggcgagttctcggaggacacgctgggcttcggcagcaggccgctggacagcttcggcctcaatatccgc

SEQ ID NO: 1806 - protein, 44 aa, Streptomyces kanamyceticus
MESQVHEVLPEPYEPPALIEVGEFSEDTLGFGSRPLDSFGLNIR

SEQ ID NO: 1807 - DNA, 108 bp, Microbacterium testaceum
  CDS (1)..(108)
atggacgacatctacgaggcgccttgtgcagtgctcgtcgccgacttccgccgcgacacggcgttgaccagtcgcggcggctggcccgacctcttgggctggtggttc

SEQ ID NO: 1808 - protein, 36 aa, Microbacterium testaceum
MDDIYEAPCAVLVADFRRDTALTSRGGWPDLLGWWF

SEQ ID NO: 1809 - DNA, 108 bp, Microbacterium testaceum
  CDS (1)..(108)
atgaccgaaacctacgagaagcctcaggtgctcgtcgtgggcgacttccgcaaggacaccgccttcacgtcccagggctactggaccgacgtcctcggctggtggctc

SEQ ID NO: 1810 - protein, 36 aa, Microbacterium testaceum
MTETYEKPQVLVVGDFRKDTAFTSQGYWTDVLGWWL

SEQ ID NO: 1811 - DNA, 108 bp, Microbacterium testaceum; identical to SEQ ID NO: 1807
  CDS (1)..(108)

SEQ ID NO: 1812 - protein, 36 aa, Microbacterium testaceum; identical to SEQ ID NO: 1808

SEQ ID NO: 1813 - DNA, 108 bp, Microbacterium testaceum; identical to SEQ ID NO: 1809
  CDS (1)..(108)

SEQ ID NO: 1814 - protein, 36 aa, Microbacterium testaceum; identical to SEQ ID NO: 1810

SEQ ID NO: 1815 - DNA, 108 bp, Microbacterium testaceum; identical to SEQ ID NO: 1809
  CDS (1)..(108)

SEQ ID NO: 1816 - protein, 36 aa, Microbacterium testaceum; identical to SEQ ID NO: 1810

SEQ ID NO: 1817 - DNA, 108 bp, Microbacterium testaceum; identical to SEQ ID NO: 1807
  CDS (1)..(108)

SEQ ID NO: 1818 - protein, 36 aa, Microbacterium testaceum; identical to SEQ ID NO: 1808

SEQ ID NO: 1819 - DNA, 138 bp, Nonomuraea coxensis
  CDS (1)..(138)
atgtacgacgagaccacctcccaccccgaccacgctcagccctacgccacgcccaccctggtcgacctcggcagcgtccgcgccatcaccctgggcagcgcccgccacgacaccgccgacaagaagaagtactacaac

SEQ ID NO: 1820 - protein, 46 aa, Nonomuraea coxensis
MYDETTSHPDHAQPYATPTLVDLGSVRAITLGSARHDTADKKKYYN

SEQ ID NO: 1821 - DNA, 141 bp, Luteimonas abyssi
  CDS (1)..(141)
atgaacgcgaacgagaacatccgcaacgaagtgcaggacggcgacgtcgtcgagctcggcgtggccagcgtcgagaccagggggatgctgccggaaggagacgaggagttcggccgcatcgtcggtgtcggcatcaccgag

SEQ ID NO: 1822 - protein, 47 aa, Luteimonas abyssi
MNANENIRNEVQDGDVVELGVASVETRGMLPEGDEEFGRIVGVGITE

SEQ ID NO: 1823 - DNA, 117 bp, Sphingomonas sp.
  CDS (1)..(117)
atggatacgaaaaagcccacgctgctcgtctatctcggcaaggtctcgaaggagaccaaggccccggcgatgttcggttcgcccgagatcggcaatctcatctacgcctaccgcgtt

SEQ ID NO: 1824 - protein, 39 aa, Sphingomonas sp.
MDTKKPTLLVYLGKVSKETKAPAMFGSPEIGNLIYAYRV

SEQ ID NO: 1825 - DNA, 138 bp, Xanthomonas sp.; identical to SEQ ID NO: 387
  CDS (1)..(138)

SEQ ID NO: 1826 - protein, 46 aa, Xanthomonas sp.; identical to SEQ ID NO: 388

SEQ ID NO: 1827 - DNA, 147 bp, Xanthomonas sp.; identical to SEQ ID NO: 389
  CDS (1)..(147)

SEQ ID NO: 1828 - protein, 49 aa, Xanthomonas sp.; identical to SEQ ID NO: 390

SEQ ID NO: 1829 - DNA, 156 bp, Frankia inefficax
  CDS (1)..(156)
atgatcgccgagaagaccggcaccgccgagggccatatcgccgcgcggcgtgcctaccagaagcccagcctgaccgagcatggcagcctcgcggtgcggacggccggccagcccggcctgctgctggacgccatcatccagatcgcgcagccgagc

SEQ ID NO: 1830 - protein, 52 aa, Frankia inefficax
MIAEKTGTAEGHIAARRAYQKPSLTEHGSLAVRTAGQPGLLLDAIIQIAQPS

SEQ ID NO: 1831 - DNA, 129 bp, Bacillus vietnamensis
  CDS (1)..(129)
atgaagaaaatttgggaagaaccaaagctgaaagtacttaacgtcaatttgacaatggctggtccaggaattagagatgtagatgaatcttatgaggatgaagatgagcaaggattccttcatcatagc

SEQ ID NO: 1832 - protein, 43 aa, Bacillus vietnamensis
MKKIWEEPKLKVLNVNLTMAGPGIRDVDESYEDEDEQGFLHHS

SEQ ID NO: 1833 - DNA, 129 bp, Bacillus sp.
  CDS (1)..(129)
atgaaacaagaatggcaatcaccagtattagaagtgcttgatatcaacatgacaatggctggacctggaaaacgaattgttgaccaagtgtttgaagatgaggatgagcaaggcacacttagccacagc

SEQ ID NO: 1834 - protein, 43 aa, Bacillus sp.
MKQEWQSPVLEVLDINMTMAGPGKRIVDQVFEDEDEQGTLSHS

SEQ ID NO: 1835 - DNA, 99 bp, Bacillus aryabhattai
  CDS (1)..(99)
atggcttctacagtctatggtccttatacggatgaagcatatgtaccaggtaaagatgttgataaagataaccctggtacatggaaacgttttacgagt

SEQ ID NO: 1836 - protein, 33 aa, Bacillus aryabhattai
MASTVYGPYTDEAYVPGKDVDKDNPGTWKRFTS

SEQ ID NO: 1837 - DNA, 123 bp, Bacillus sp.
  CDS (1)..(123)
atgaaaaaagaatggcaaactccaaaattagaagtacttaacatcaacatgactatgggaggtcccggtataatgatccctgatggtgtgcagaatgatccagatgaaatggttcaccatagt

SEQ ID NO: 1838 - protein, 41 aa, Bacillus sp.
MKKEWQTPKLEVLNINMTMGGPGIMIPDGVQNDPDEMVHHS

SEQ ID NO: 1839 - DNA, 129 bp, Bacillus pseudomycoides
  CDS (1)..(129)
atgaaacaagaatggcaatcaccagtattagaagtgcttgatatcaacatgacaatggctggacctggaaagagacttgttgaccaagtttttgaagatgaggatgagcaaggcgcacttcaccacaac

SEQ ID NO: 1840 - protein, 43 aa, Bacillus pseudomycoides
MKQEWQSPVLEVLDINMTMAGPGKRLVDQVFEDEDEQGALHHN

SEQ ID NO: 1841 - DNA, 132 bp, Bacillus kribbensis
  CDS (1)..(132)
atgaaaaagcagtgggaaaagcctgttctggaagtacttgatgtgaaaatgactatgggacacacagcacagatggaccatcttgacgctaaatatgaagctggtacaccgtatgcgaagttgacttggagt

SEQ ID NO: 1842 - protein, 44 aa, Bacillus kribbensis
MKKQWEKPVLEVLDVKMTMGHTAQMDHLDAKYEAGTPYAKLTWS

SEQ ID NO: 1843 - DNA, 129 bp, Bacillus mycoides
  CDS (1)..(129)
atgaaacaagaatggcaatcaccagtattagaagtgcttgatatcaacatgacaatggctggacctggaaagagacttgttgaccaagtttttgaagatgaggatgagcaaggcgcacttcaccacagc

SEQ ID NO: 1844 - protein, 43 aa, Bacillus mycoides
MKQEWQSPVLEVLDINMTMAGPGKRLVDQVFEDEDEQGALHHS

SEQ ID NO: 1845 - DNA, 129 bp, Bacillus cereus
  CDS (1)..(129)
atgaaaaaagagtggaaaactccggtgctagagacactggatattaatatgactatggcatcaggatacgagggctatcatgatgaagcttacaatggtgaacctgcaaatggtccgcatcatcagtca

SEQ ID NO: 1846 - protein, 43 aa, Bacillus cereus
MKKEWKTPVLETLDINMTMASGYEGYHDEAYNGEPANGPHHQS

SEQ ID NO: 1847 - DNA, 129 bp, Bacillus mycoides; identical to SEQ ID NO: 1843
  CDS (1)..(129)

SEQ ID NO: 1848 - protein, 43 aa, Bacillus mycoides; identical to SEQ ID NO: 1844

SEQ ID NO: 1849 - DNA, 129 bp, Bacillus mycoides; identical to SEQ ID NO: 1843
  CDS (1)..(129)

SEQ ID NO: 1850 - protein, 43 aa, Bacillus mycoides; identical to SEQ ID NO: 1844

SEQ ID NO: 1851 - DNA, 129 bp, Bacillus mycoides; identical to SEQ ID NO: 1843
  CDS (1)..(129)

SEQ ID NO: 1852 - protein, 43 aa, Bacillus mycoides; identical to SEQ ID NO: 1844

SEQ ID NO: 1853 - DNA, 129 bp, Bacillus mycoides; identical to SEQ ID NO: 1843
  CDS (1)..(129)

SEQ ID NO: 1854 - protein, 43 aa, Bacillus mycoides; identical to SEQ ID NO: 1844

SEQ ID NO: 1855 - DNA, 129 bp, Bacillus mycoides; identical to SEQ ID NO: 1843
  CDS (1)..(129)

SEQ ID NO: 1856 - protein, 43 aa, Bacillus mycoides; identical to SEQ ID NO: 1844

SEQ ID NO: 1857 - DNA, 123 bp, Bacillus sp.
  CDS (1)..(123)
atgaaaaaagaatggaagaaaccagtactagaagtgcttgatattaatatgacaatggctggaccaggacataaaattccggatgcagttcagcccgatccagatgatcctgtaaagtacagc

SEQ ID NO: 1858 - protein, 41 aa, Bacillus sp.
MKKEWKKPVLEVLDINMTMAGPGHKIPDAVQPDPDDPVKYS

SEQ ID NO: 1859 - DNA, 123 bp, Bacillus cereus
  CDS (1)..(123)
atgaaaaaagattggacaattcctacattggaagtacttgatattaatatgacaatggctggaccaggtattaaaacacctgatgctgttcaaccagatgttgatgaagtagttcactatagt

SEQ ID NO: 1860 - protein, 41 aa, Bacillus cereus
MKKDWTIPTLEVLDINMTMAGPGIKTPDAVQPDVDEVVHYS

SEQ ID NO: 1861 - DNA, 129 bp, Bacillus mycoides; identical to SEQ ID NO: 1843
  CDS (1)..(129)

SEQ ID NO: 1862 - protein, 43 aa, Bacillus mycoides; identical to SEQ ID NO: 1844

SEQ ID NO: 1863 - DNA, 129 bp, Bacillus mycoides; identical to SEQ ID NO: 1843
  CDS (1)..(129)

SEQ ID NO: 1864 - protein, 43 aa, Bacillus mycoides; identical to SEQ ID NO: 1844

SEQ ID NO: 1865 - DNA, 129 bp, Bacillus mycoides; identical to SEQ ID NO: 1843
  CDS (1)..(129)

SEQ ID NO: 1866 - protein, 43 aa, Bacillus mycoides; identical to SEQ ID NO: 1844

SEQ ID NO: 1867 - DNA, 123 bp, Bacillus simplex
  CDS (1)..(123)
atgaaaaaagaatggcaaactccaaaattagaagtacttaacattaacatgactatggggggtcccggtataatgatccctgatgctatgcagaatgatccggatgaaatggttcaccatagt

SEQ ID NO: 1868 - protein, 41 aa, Bacillus simplex
MKKEWQTPKLEVLNINMTMGGPGIMIPDAMQNDPDEMVHHS

SEQ ID NO: 1869 - DNA, 129 bp, Bacillus cereus
  CDS (1)..(129)
atgaaacaagaatggcaatcaccagtattagaagtgcttgatatcaacatgacaatggctggaccaggaaagagacttgttgaccaagtttttgaagatgaggatgagtcaggcgctcttcaccacagc

SEQ ID NO: 1870 - protein, 43 aa, Bacillus cereus
MKQEWQSPVLEVLDINMTMAGPGKRLVDQVFEDEDESGALHHS

SEQ ID NO: 1871 - DNA, 129 bp, Bacillus mycoides; identical to SEQ ID NO: 1843
  CDS (1)..(129)

SEQ ID NO: 1872 - protein, 43 aa, Bacillus mycoides; identical to SEQ ID NO: 1844

SEQ ID NO: 1873 - DNA, 99 bp, Bacillus sp.
  CDS (1)..(99)
atggcttcaacagtttatggtccatatactgatgaagcatacaaccctggtcaccctgttgatccaaaaaatcctgatacttggaaccgttttactagc

SEQ ID NO: 1874 - protein, 33 aa, Bacillus sp.
MASTVYGPYTDEAYNPGHPVDPKNPDTWNRFTS

SEQ ID NO: 1875 - DNA, 132 bp, Bacillus sp.
  CDS (1)..(132)
atgaaaaaggaatgggaaaagccagtattagaagtactagatattaatatgacaatgttaggttccaaaaacggaggcgttgatttttatgttaaagatccgtttgatggcgaagaagcagtattgcatagt

SEQ ID NO: 1876 - protein, 44 aa, Bacillus sp.
MKKEWEKPVLEVLDINMTMLGSKNGGVDFYVKDPFDGEEAVLHS

SEQ ID NO: 1877 - DNA, 111 bp, Jeotgalibacillus soli
  CDS (1)..(111)
atgccaacacttgaagtgcttgaagtgaagatgaccatgcttggacgtgaaggagaatttacagatgctgatttcgatgctcatacaccatttttagaattaacttttagc

SEQ ID NO: 1878 - protein, 37 aa, Jeotgalibacillus soli
MPTLEVLEVKMTMLGREGEFTDADFDAHTPFLELTFS

SEQ ID NO: 1879 - DNA, 129 bp, Bacillus mycoides; identical to SEQ ID NO: 1843
  CDS (1)..(129)

SEQ ID NO: 1880 - protein, 43 aa, Bacillus mycoides; identical to SEQ ID NO: 1844

SEQ ID NO: 1881 - DNA, 123 bp, Bacillus sp.
  CDS (1)..(123)
atgaaaaaagattggaccattcctacactggaagtacttgatattaatatgacaatggctggaccgggacttaaaacaccggatgctgttcaaccagatattgatgaagtagtgcactatagt

SEQ ID NO: 1882 - protein, 41 aa, Bacillus sp.
MKKDWTIPTLEVLDINMTMAGPGLKTPDAVQPDIDEVVHYS

SEQ ID NO: 1883 - DNA, 132 bp, Bacillus sp.
  CDS (1)..(132)
atgaaaaaggaatgggaaaaacctgaattagagattcttgatgttaataagacaatgcttggtacggatggtgagtacacagatgctgcttttccttctcacacgcctaaaggagatctaacgtttggaagc

SEQ ID NO: 1884 - protein, 44 aa, Bacillus sp.
MKKEWEKPELEILDVNKTMLGTDGEYTDAAFPSHTPKGDLTFGS

SEQ ID NO: 1885 - DNA, 132 bp, Bacillus sp.
  CDS (1)..(132)
atgaaaaaggaatggaaaaaacctgaattagagattcttgatgttaataagacaatgcttggtacggatggtgagtacacagatgctgctttcccttctcacactcctaaaggagatataacttttggtagt

SEQ ID NO: 1886 - protein, 44 aa, Bacillus sp.
MKKEWKKPELEILDVNKTMLGTDGEYTDAAFPSHTPKGDITFGS

SEQ ID NO: 1887 - DNA, 123 bp, Bacillus cereus
  CDS (1)..(123)
atgaaaaaagattggacaattcctacattggaagtacttgatatcaatatgacaatggctggaccgggtattaaaatacctgatggtgttcaaccggatgaggacgaaatggttcaccatagc

SEQ ID NO: 1888 - protein, 41 aa, Bacillus cereus
MKKDWTIPTLEVLDINMTMAGPGIKIPDGVQPDEDEMVHHS

SEQ ID NO: 1889 - DNA, 123 bp, Bacillus sp.; identical to SEQ ID NO: 1881
  CDS (1)..(123)

SEQ ID NO: 1890 - protein, 41 aa, Bacillus sp.; identical to SEQ ID NO: 1882

SEQ ID NO: 1891 - DNA, 123 bp, Bacillus sp.; identical to SEQ ID NO: 1881
  CDS (1)..(123)

SEQ ID NO: 1892 - protein, 41 aa, Bacillus sp.; identical to SEQ ID NO: 1882

SEQ ID NO: 1893 - DNA, 123 bp, Bacillus sp.
  CDS (1)..(123)
atgaaaaaggtatgggtaaaaccagaattagaagtacttaatgtaaatatgactatggcgggaccaggaattaagacacctgatgcagtacaaccagatgttgatgaagtgattcattatagt

SEQ ID NO: 1894 - protein, 41 aa, Bacillus sp.
MKKVWVKPELEVLNVNMTMAGPGIKTPDAVQPDVDEVIHYS

SEQ ID NO: 1895 - DNA, 123 bp, Bacillus cereus; identical to SEQ ID NO: 1887
  CDS (1)..(123)

SEQ ID NO: 1896 - protein, 41 aa, Bacillus cereus; identical to SEQ ID NO: 1888

SEQ ID NO: 1897 - DNA, 105 bp, Bacillus weihenstephanensis
  CDS (1)..(105)
atgcctacactggaagtgcttgatatcaatatgacaatggctggaccgggtattaaaatacctgatgctgcccaaccagatgttgatgaaacgattcaccatagc

SEQ ID NO: 1898 - protein, 35 aa, Bacillus weihenstephanensis
MPTLEVLDINMTMAGPGIKIPDAAQPDVDETIHHS

SEQ ID NO: 1899 - DNA, 123 bp, Bacillus cereus; identical to SEQ ID NO: 1887
  CDS (1)..(123)

SEQ ID NO: 1900 - protein, 41 aa, Bacillus cereus; identical to SEQ ID NO: 1888

SEQ ID NO: 1901 - DNA, 129 bp, Bacillus cereus
  CDS (1)..(129)
atgaaaaaagaatgggagaaacctattttagaggtgttggatgtgaagatgacaatgttggggaaagaaggagagtatactgatgctgcttttcctgaacatactccaaagggtgatataacttttagt

SEQ ID NO: 1902 - protein, 43 aa, Bacillus cereus
MKKEWEKPILEVLDVKMTMLGKEGEYTDAAFPEHTPKGDITFS

SEQ ID NO: 1903 - DNA, 123 bp, Bacillus thuringiensis
  CDS (1)..(123)
atgaaaaaggaatggaaacaacctgtattagaagtacttaatgttaatatgactatggcgggaccaggacataaaattcctgacgcagttcaacctgatccagatgatccagtgaagtatagt

SEQ ID NO: 1904 - protein, 41 aa, Bacillus thuringiensis
MKKEWKQPVLEVLNVNMTMAGPGHKIPDAVQPDPDDPVKYS

SEQ ID NO: 1905 - DNA, 129 bp, Bacillus cereus
  CDS (1)..(129)
atgaaaaaagaatgggagaaacctattttagaggtgttggatgtgaagatgacaatgttggggaaagaaggagagtatactgatgccgcttttccggaccatactcctaagggtgatctaacttttagt

SEQ ID NO: 1906 - protein, 43 aa, Bacillus cereus
MKKEWEKPILEVLDVKMTMLGKEGEYTDAAFPDHTPKGDLTFS

SEQ ID NO: 1907 - DNA, 81 bp, Halobacillus sp.
  CDS (1)..(81)
atgacaatggctgccggttacgaaggttaccatgatgaagcttataatggagagcctgcttatggtccacaccacgagtca

SEQ ID NO: 1908 - protein, 27 aa, Halobacillus sp.
MTMAAGYEGYHDEAYNGEPAYGPHHES

SEQ ID NO: 1909 - DNA, 111 bp, Paenibacillus sp.
  CDS (1)..(111)
atgttgcaagtccttgatgtcagcgagaccatgggtggaaaaaatggagtgtatcctgacagaaatggtaaaggtaacaataatggtcagcctcatgaggacatggactct

SEQ ID NO: 1910 - protein, 37 aa, Paenibacillus sp.
MLQVLDVSETMGGKNGVYPDRNGKGNNNGQPHEDMDS

SEQ ID NO: 1911 - DNA, 135 bp, Paenibacillus sp.
  CDS (1)..(135)
atgcaaaatcaagctaaaaaagaatggaatatcccgactttggaagtacttgatgtgaaaatgacaatggctggaccaggaattgcacatccggatggcgttcaacccgacccgactgaggtcgttcactacagc

SEQ ID NO: 1912 - protein, 45 aa, Paenibacillus sp.
MQNQAKKEWNIPTLEVLDVKMTMAGPGIAHPDGVQPDPTEVVHYS

SEQ ID NO: 1913 - DNA, 123 bp, Bacillus cereus
  CDS (1)..(123)
atgaaaaaagattggacaattcctacactggaagtacttgatattaatatgacgatggctggaccgggacttaaaacaccggatgctgttcaaccagatgttgatgaagtagtgcactatagt

SEQ ID NO: 1914 - protein, 41 aa, Bacillus cereus
MKKDWTIPTLEVLDINMTMAGPGLKTPDAVQPDVDEVVHYS

SEQ ID NO: 1915 - DNA, 123 bp, Bacillus cereus
  CDS (1)..(123)
atgaaaaaggaatggaaacaacctgtattagaagtacttaatattaatatgactatggcggggccaggacataaatatcctgactcgattcaacctgatccagatgatccggtgaagtatagt

SEQ ID NO: 1916 - protein, 41 aa, Bacillus cereus
MKKEWKQPVLEVLNINMTMAGPGHKYPDSIQPDPDDPVKYS

SEQ ID NO: 1917 - DNA, 135 bp, Paenibacillus sp.; identical to SEQ ID NO: 1911
  CDS (1)..(135)

SEQ ID NO: 1918 - protein, 45 aa, Paenibacillus sp.; identical to SEQ ID NO: 1912

SEQ ID NO: 1919 - DNA, 99 bp, Paenibacillus sp.
  CDS (1)..(99)
atggcatcgacagtttacggtgatttcactgacgaagcttatgtacctggtaaaccggttgatcctaacaacccaagcacctggaaacgtttcaacagc

SEQ ID NO: 1920 - protein, 33 aa, Paenibacillus sp.
MASTVYGDFTDEAYVPGKPVDPNNPSTWKRFNS

SEQ ID NO: 1921 - DNA, 123 bp, Bacillus weihenstephanensis
  CDS (1)..(123)
atgaaaaaggaatggaaacaacctgtattagaagtacttaatattaatatgactatggcggggcctgggcataaatatccagatgctgttcaacctgacccagatgatccagtgaagtacagt

SEQ ID NO: 1922 - protein, 41 aa, Bacillus weihenstephanensis
MKKEWKQPVLEVLNINMTMAGPGHKYPDAVQPDPDDPVKYS

SEQ ID NO: 1923 - DNA, 123 bp, Bacillus weihenstephanensis; identical to SEQ ID NO: 1921
  CDS (1)..(123)

SEQ ID NO: 1924 - protein, 41 aa, Bacillus weihenstephanensis; identical to SEQ ID NO: 1922

SEQ ID NO: 1925 - DNA, 123 bp, Bacillus weihenstephanensis; identical to SEQ ID NO: 1921
  CDS (1)..(123)

SEQ ID NO: 1926 - protein, 41 aa, Bacillus weihenstephanensis; identical to SEQ ID NO: 1922

SEQ ID NO: 1927 - DNA, 123 bp, Bacillus weihenstephanensis; identical to SEQ ID NO: 1921
  CDS (1)..(123)

SEQ ID NO: 1928 - protein, 41 aa, Bacillus weihenstephanensis; identical to SEQ ID NO: 1922

SEQ ID NO: 1929 - DNA, 141 bp, Paenibacillus sp.
  CDS (1)..(141)
atgcaaacgaaaaaacaatggaataaacctgagctagaggtccttcatgtacatatgactgcggcttccacgaaaaacggtccgttcacagatgaggcttacgtacctggccaacattctgaaaagccacgttttactagc

SEQ ID NO: 1930 - protein, 47 aa, Paenibacillus sp.
MQTKKQWNKPELEVLHVHMTAASTKNGPFTDEAYVPGQHSEKPRFTS

SEQ ID NO: 1931 - DNA, 141 bp, Bacillus sp.
  CDS (1)..(141)
atgcaagtgaaaaaacaatggaacaaacctgaactagaagtccttcatgtacatatgaccgcggcttccactaaaaccggtccttatactgatgaggcatacgtgccgggtgaatattccgaagatcctcgtttcactagc

SEQ ID NO: 1932 - protein, 47 aa, Bacillus sp.
MQVKKQWNKPELEVLHVHMTAASTKTGPYTDEAYVPGEYSEDPRFTS

SEQ ID NO: 1933 - DNA, 123 bp, Paenibacillus sp.
  CDS (1)..(123)
atgaaaaaagagtggaacgtacctgcattggaagtacttagtataaacatgacgatggctggtcctggtgattcaagaccggatggggtacaaccggaccctgatgaaagtgtacactacagc

SEQ ID NO: 1934 - protein, 41 aa, Paenibacillus sp.
MKKEWNVPALEVLSINMTMAGPGDSRPDGVQPDPDESVHYS

SEQ ID NO: 1935 - DNA, 123 bp, Bacillus cereus
  CDS (1)..(123)
atgaaaaaggaatggaaacaacctgtattagaagtacttaatattaatatgactatggcggggccaggacataaaattcctgacgcagttcaacctgatccagatgatccagtgaagtatagt

SEQ ID NO: 1936 - protein, 41 aa, Bacillus cereus
MKKEWKQPVLEVLNINMTMAGPGHKIPDAVQPDPDDPVKYS

SEQ ID NO: 1937 - DNA, 123 bp, Bacillus cereus
  CDS (1)..(123)
atgaaaaaggaatggaaacaacctgtattagaagtacttaatattaatatgactatggcgggacctggacataaatatcctgatgctgctcaacctgatccagatgatccagtgaagtatagt

SEQ ID NO: 1938 - protein, 41 aa, Bacillus cereus
MKKEWKQPVLEVLNINMTMAGPGHKYPDAAQPDPDDPVKYS

SEQ ID NO: 1939 - DNA, 123 bp, Bacillus weihenstephanensis; identical to SEQ ID NO: 1921
  CDS (1)..(123)

SEQ ID NO: 1940 - protein, 41 aa, Bacillus weihenstephanensis; identical to SEQ ID NO: 1922

SEQ ID NO: 1941 - DNA, 123 bp, Bacillus cereus
  CDS (1)..(123)
atgaaaaaggaatggaaacaacctgtattggaagtacttaatattaatatgactatggcgggacctgggcataaacttcctgatgctgttcaacctgatccagatgatgcggtgaagtatagt

SEQ ID NO: 1942 - protein, 41 aa, Bacillus cereus
MKKEWKQPVLEVLNINMTMAGPGHKLPDAVQPDPDDAVKYS

SEQ ID NO: 1943 - DNA, 123 bp, Bacillus weihenstephanensis; identical to SEQ ID NO: 1921
  CDS (1)..(123)

SEQ ID NO: 1944 - protein, 41 aa, Bacillus weihenstephanensis; identical to SEQ ID NO: 1922

SEQ ID NO: 1945 - DNA, 129 bp, Paenisporosarcina sp.
  CDS (1)..(129)
atgaaaaaacaatggaagaaacccaaactggaagttcttgatgtaagtatgacaatgcttggtactgatggtgagtacacagatgcagcttttaatagtgacactcctaaaggggatgtaactttcagt

SEQ ID NO: 1946 - protein, 43 aa, Paenisporosarcina sp.
MKKQWKKPKLEVLDVSMTMLGTDGEYTDAAFNSDTPKGDVTFS

SEQ ID NO: 1947 - DNA, 126 bp, Paenisporosarcina sp.
  CDS (1)..(126)
atgaaaaaacaatggaagaaacctgaactagaagttcttgaagtaaatatgacaatgggtggtgataatggtgagtacccagatgcagctagtaaaggaggtttcaataatagaaaaacagaaagc

SEQ ID NO: 1948 - protein, 42 aa, Paenisporosarcina sp.
MKKQWKKPELEVLEVNMTMGGDNGEYPDAASKGGFNNRKTES

SEQ ID NO: 1949 - DNA, 123 bp, Bacillus weihenstephanensis; identical to SEQ ID NO: 1921
  CDS (1)..(123)

SEQ ID NO: 1950 - protein, 41 aa, Bacillus weihenstephanensis; identical to SEQ ID NO: 1922

SEQ ID NO: 1951 - DNA, 123 bp, Bacillus cereus
  CDS (1)..(123)
atgaaaaaggaatggaaacaacctatattagaagtacttaatattaatatgactatggcggggccaggacgtagaattcctgacgcagttcaacctgatccagatgatccagtgaagtatagt

SEQ ID NO: 1952 - protein, 41 aa, Bacillus cereus
MKKEWKQPILEVLNINMTMAGPGRRIPDAVQPDPDDPVKYS

SEQ ID NO: 1953 - DNA, 123 bp, Bacillus cereus; identical to SEQ ID NO: 1941
  CDS (1)..(123)

SEQ ID NO: 1954 - protein, 41 aa, Bacillus cereus; identical to SEQ ID NO: 1942

SEQ ID NO: 1955 - DNA, 123 bp, Bacillus weihenstephanensis; identical to SEQ ID NO: 1921
  CDS (1)..(123)

SEQ ID NO: 1956 - protein, 41 aa, Bacillus weihenstephanensis; identical to SEQ ID NO: 1922

SEQ ID NO: 1957 - DNA, 123 bp, Bacillus weihenstephanensis; identical to SEQ ID NO: 1921
  CDS (1)..(123)

SEQ ID NO: 1958 - protein, 41 aa, Bacillus weihenstephanensis; identical to SEQ ID NO: 1922

SEQ ID NO: 1959 - DNA, 123 bp, Bacillus cereus
  CDS (1)..(123)
atgaaaaaggaatggaaacaacctgtattagaagtgcttaatattaatatgactatggcggggccaggacatagaattcctgacgcagttcaacctgatccagatgatccggtgaagtatagt

SEQ ID NO: 1960 - protein, 41 aa, Bacillus cereus
MKKEWKQPVLEVLNINMTMAGPGHRIPDAVQPDPDDPVKYS

SEQ ID NO: 1961 - DNA, 123 bp, Paenibacillus sp.
  CDS (1)..(123)
atgcaaaaacaatggcaaaaaccggagttggaagcccttgatcttagtatgacgatggctggagagccagacgagcgtgttgacctatcttttttcggtattcctcttgcacttgggcctagc

SEQ ID NO: 1962 - protein, 41 aa, Paenibacillus sp.
MQKQWQKPELEALDLSMTMAGEPDERVDLSFFGIPLALGPS

SEQ ID NO: 1963 - DNA, 126 bp, Paenibacillus sp.
  CDS (1)..(126)
atgcaaaaacagtggaataaacctgaattacaaacacttgatctaagtatgacattggctggtccaacctctgattatatcgatgctacttactctgatcaaaatgaaactgttcatcttcatagc

SEQ ID NO: 1964 - protein, 42 aa, Paenibacillus sp.
MQKQWNKPELQTLDLSMTLAGPTSDYIDATYSDQNETVHLHS

SEQ ID NO: 1965 - DNA, 123 bp, Bacillus cereus; identical to SEQ ID NO: 1941
  CDS (1)..(123)

SEQ ID NO: 1966 - protein, 41 aa, Bacillus cereus; identical to SEQ ID NO: 1942

SEQ ID NO: 1967 - DNA, 123 bp, Bacillus weihenstephanensis; identical to SEQ ID NO: 1921
  CDS (1)..(123)

SEQ ID NO: 1968 - protein, 41 aa, Bacillus weihenstephanensis; identical to SEQ ID NO: 1922

SEQ ID NO: 1969 - DNA, 126 bp, Paenibacillus sp.
  CDS (1)..(126)
atgaacaaaacatgggaaaaaccagaattagaagtacttgatgtgaaaatgactatgacaggatttccggatcaacagcgggacttcttggacactaataacacagaacaccttatgggaccaagc

SEQ ID NO: 1970 - protein, 42 aa, Paenibacillus sp.
MNKTWEKPELEVLDVKMTMTGFPDQQRDFLDTNNTEHLMGPS

SEQ ID NO: 1971 - DNA, 132 bp, Paenibacillus alginolyticus
  CDS (1)..(132)
atgaaaaaagaatggttgaaacctgagcttgaagtattggatgttaatcaaacaatgcttgatccgaaaaatggtaaccaccttgatcatgcttatacggaaggtactcctaaagacaaattaacatggagc

SEQ ID NO: 1972 - protein, 44 aa, Paenibacillus alginolyticus
MKKEWLKPELEVLDVNQTMLDPKNGNHLDHAYTEGTPKDKLTWS

SEQ ID NO: 1973 - DNA, 123 bp, Bacillus cereus
  CDS (1)..(123)
atgaaaaaggaatggaaacaacctgtattggaagtacttagtattaatatgactatggcgggacctgggcataaacttcctgatgctgttcaacctgatccagatgatgcggtgaagtatagt

SEQ ID NO: 1974 - protein, 41 aa, Bacillus cereus
MKKEWKQPVLEVLSINMTMAGPGHKLPDAVQPDPDDAVKYS

SEQ ID NO: 1975 - DNA, 123 bp, Bacillus oceanisediminis
  CDS (1)..(123)
atgaaaaagcaatggcagaaacctgagttagaggtacttaatattaatatgactatggcaggacctggaattaaaacacctgatgctgtacagccagatcaagatgaaacggtacattatagt

SEQ ID NO: 1976 - protein, 41 aa, Bacillus oceanisediminis
MKKQWQKPELEVLNINMTMAGPGIKTPDAVQPDQDETVHYS

SEQ ID NO: 1977 - DNA, 123 bp, Bacillus flexus
  CDS (1)..(123)
atgaaaagagaatgggagaaaccggtattagaagtacttgatgtgaacatgacaatggctggacctggattaagcacacctgacgcggtacagcctgaccctgatgaaacaattcattatagt

SEQ ID NO: 1978 - protein, 41 aa, Bacillus flexus
MKREWEKPVLEVLDVNMTMAGPGLSTPDAVQPDPDETIHYS

SEQ ID NO: 1979 - DNA, 123 bp, Bacillus weihenstephanensis; identical to SEQ ID NO: 1921
  CDS (1)..(123)

SEQ ID NO: 1980 - protein, 41 aa, Bacillus weihenstephanensis; identical to SEQ ID NO: 1922

SEQ ID NO: 1981 - DNA, 126 bp, Bacillus sp.
  CDS (1)..(126)
atgaaaaagacatggaaaacaccagaattagaaattcttgatgttaatatgacaatggcaggtccaggatctacaattccagacgcagtacaacctgatccaaatgaaacaattcactatgaaagc

SEQ ID NO: 1982 - protein, 42 aa, Bacillus sp.
MKKTWKTPELEILDVNMTMAGPGSTIPDAVQPDPNETIHYES

SEQ ID NO: 1983 - DNA, 135 bp, Bacillus sp.
  CDS (1)..(135)
atgaaaaagcaatggaaacaaccagttctagaggtgttagatgtcagtatgacaatggcaggaccaggaattagaattcctgatgcagttcaaccagatccagatgctccacttaatgatgtggtgcattatagt

SEQ ID NO: 1984 - protein, 45 aa, Bacillus sp.
MKKQWKQPVLEVLDVSMTMAGPGIRIPDAVQPDPDAPLNDVVHYS

SEQ ID NO: 1985 - DNA, 123 bp, Bacillus flexus
  CDS (1)..(123)
atgaaaagagaatgggaaaagcctgtactagaagtacttgatgtaaatatgactatggctggacctggacacagattgcctgatgcagtgcaaccggatccagacgatgcagttaagtatagt

SEQ ID NO: 1986 - protein, 41 aa, Bacillus flexus
MKREWEKPVLEVLDVNMTMAGPGHRLPDAVQPDPDDAVKYS

SEQ ID NO: 1987 - DNA, 132 bp, Aneurinibacillus migulanus
  CDS (1)..(132)
atgaaaaaggaatggaaaaaacctagtttagaagtgctctctgtaaaggagacgatgcttggaagctcagggaaatacaccgacgctgcctttggttctcatactcctatagacgatatcactttcgaaagc

SEQ ID NO: 1988 - protein, 44 aa, Aneurinibacillus migulanus
MKKEWKKPSLEVLSVKETMLGSSGKYTDAAFGSHTPIDDITFES

SEQ ID NO: 1989 - DNA, 132 bp, Aneurinibacillus migulanus
  CDS (1)..(132)
atgaaaaaggagtggaaaaaacctagtttagaagtgctctctgtaagagagacgatgcttggaagctcagggaaatataccgacgctgcctttggttcccatactcctatagacgatatcactttcgaaagc

SEQ ID NO: 1990 - protein, 44 aa, Aneurinibacillus migulanus
MKKEWKKPSLEVLSVRETMLGSSGKYTDAAFGSHTPIDDITFES

SEQ ID NO: 1991 - DNA, 75 bp, Paenibacillus harenae
  CDS (1)..(75)
atgacaatggcaggcccaggcattgcaacaccggacgccgtacaaccggacccaacggaagtgatccacttcagt

SEQ ID NO: 1992 - protein, 25 aa, Paenibacillus harenae
MTMAGPGIATPDAVQPDPTEVIHFS

SEQ ID NO: 1993 - DNA, 132 bp, Paenibacillus harenae
  CDS (1)..(132)
atgaagaaagaatggcagccactgacgttggaactccttgatgtcagcgcgaccatgggtggaccaaatggaatctatcctgacagaaacggcaaaggcaacaataatggtcaccctcatgctgaagaatcc

SEQ ID NO: 1994 - protein, 44 aa, Paenibacillus harenae
MKKEWQPLTLELLDVSATMGGPNGIYPDRNGKGNNNGHPHAEES

SEQ ID NO: 1995 - DNA, 132 bp, Aneurinibacillus migulanus; identical to SEQ ID NO: 1987
  CDS (1)..(132)

SEQ ID NO: 1996 - protein, 44 aa, Aneurinibacillus migulanus; identical to SEQ ID NO: 1988

SEQ ID NO: 1997 - DNA, 132 bp, Aneurinibacillus migulanus; identical to SEQ ID NO: 1989
  CDS (1)..(132)

SEQ ID NO: 1998 - protein, 44 aa, Aneurinibacillus migulanus; identical to SEQ ID NO: 1990

SEQ ID NO: 1999 - DNA, 123 bp, Bacillus sp.
  CDS (1)..(123)
atgaaaaaggaatggagcgtacctgtactggaagtccttgacatgaacatgacaatggctggtcccggaaatgcaattccggatggagttcagcccgatccggatgagctcgttcactacagc

SEQ ID NO: 2000 - protein, 41 aa, Bacillus sp.
MKKEWSVPVLEVLDMNMTMAGPGNAIPDGVQPDPDELVHYS

SEQ ID NO: 2001 - DNA, 111 bp, Bacillus sp.
  CDS (1)..(111)
atgttagaagtacttgatattaatatgactatggctggaccaggaattaaaacacctgatgcagttcaaccagatccggatgcacctctaaaggatcaagtacattatagt

SEQ ID NO: 2002 - protein, 37 aa, Bacillus sp.
MLEVLDINMTMAGPGIKTPDAVQPDPDAPLKDQVHYS

SEQ ID NO: 2003 - DNA, 123 bp, Bacillus sp.
  CDS (1)..(123)
atgaaaaaagagtggaagaagccagtactagaagtacttgatgtaaatatgactatggccggtccaggaactagtattcctgatgcggtacagccagatccagacgaaacagttcactacagc

SEQ ID NO: 2004 - protein, 41 aa, Bacillus sp.
MKKEWKKPVLEVLDVNMTMAGPGTSIPDAVQPDPDETVHYS

SEQ ID NO: 2005 - DNA, 123 bp, Bacillus boroniphilus
  CDS (1)..(123)
atgaaaaagcaatggcaaaaaccagagttagaagtacttaatgtcactatgacaatggctggaccaggaattaaaactcctgatgctgttcaaccggaccaagacgaaatggttcactatagt

SEQ ID NO: 2006 - protein, 41 aa, Bacillus boroniphilus
MKKQWQKPELEVLNVTMTMAGPGIKTPDAVQPDQDEMVHYS

SEQ ID NO: 2007 - DNA, 123 bp, Paenibacillus solani
  CDS (1)..(123)
atgaaacaggaatggagcgtacccgtactggaagtccttgacatgaatatgacaatggctggtcccggaagtgcaattccggatggagttcagcccgatccggatgagatggttcactacagc

SEQ ID NO: 2008 - protein, 41 aa, Paenibacillus solani
MKQEWSVPVLEVLDMNMTMAGPGSAIPDGVQPDPDEMVHYS

SEQ ID NO: 2009 - DNA, 135 bp, Bacillus sp.
  CDS (1)..(135)
atgaaaaaacaatggaaagctccagagttagaagtgcttaatattagtatgacgatggctggtcctggaataaaaactccagatgcagttcagccagatccggatgctgatgaaaatgatgtagttcattatagc

SEQ ID NO: 2010 - protein, 45 aa, Bacillus sp.
MKKQWKAPELEVLNISMTMAGPGIKTPDAVQPDPDADENDVVHYS

SEQ ID NO: 2011 - DNA, 123 bp, Bacillus sp.; identical to SEQ ID NO: 2003
  CDS (1)..(123)

SEQ ID NO: 2012 - protein, 41 aa, Bacillus sp.; identical to SEQ ID NO: 2004

SEQ ID NO: 2013 - DNA, 123 bp, Bacillus sp.; identical to SEQ ID NO: 2003
  CDS (1)..(123)

SEQ ID NO: 2014 - protein, 41 aa, Bacillus sp.; identical to SEQ ID NO: 2004

SEQ ID NO: 2015 - DNA, 123 bp, Bacillus aryabhattai
  CDS (1)..(123)
atgaaaaaagagtggaagaagccagtactagaagtacttgatgtaaatatgacgatggccggtccaggaactagtattcctgatgcggtacagccagatccagacgaagatgttcactacagc

SEQ ID NO: 2016 - protein, 41 aa, Bacillus aryabhattai
MKKEWKKPVLEVLDVNMTMAGPGTSIPDAVQPDPDEDVHYS

SEQ ID NO: 2017 - DNA, 123 bp, Bacillus sp.; identical to SEQ ID NO: 2003
  CDS (1)..(123)

SEQ ID NO: 2018 - protein, 41 aa, Bacillus sp.; identical to SEQ ID NO: 2004

SEQ ID NO: 2019 - DNA, 99 bp, Bacillus vietnamensis
  CDS (1)..(99)
atggcatctaccgtatggggaccatatactgatgaagcttacgtacctggtgaagacgtagataaagatgatccaaaaacatgggaccgctttacgagc

SEQ ID NO: 2020 - protein, 33 aa, Bacillus vietnamensis
MASTVWGPYTDEAYVPGEDVDKDDPKTWDRFTS

SEQ ID NO: 2021 - DNA, 123 bp, Bacillus sp.
  CDS (1)..(123)
atgaaaaagcaatggagtgagcctgctttggaggtactggacatgaagatgacgatggctggtcctggtaacgcgatcccggacggtgtacaaccggatcccgatgaattggtccatactagc

SEQ ID NO: 2022 - protein, 41 aa, Bacillus sp.
MKKQWSEPALEVLDMKMTMAGPGNAIPDGVQPDPDELVHTS

SEQ ID NO: 2023 - DNA, 99 bp, Bacillus cereus
  CDS (1)..(99)
atggcttctacagtctttggaccgtataccgatgaagcatatgtgccaggtaagccagaagatcctaataatcctggtacttggaatcgctttacgagt

SEQ ID NO: 2024 - protein, 33 aa, Bacillus cereus
MASTVFGPYTDEAYVPGKPEDPNNPGTWNRFTS

SEQ ID NO: 2025 - DNA, 135 bp, Bacillus sp.; identical to SEQ ID NO: 2009
  CDS (1)..(135)

SEQ ID NO: 2026 - protein, 45 aa, Bacillus sp.; identical to SEQ ID NO: 2010

SEQ ID NO: 2027 - DNA, 123 bp, Bacillus weihenstephanensis; identical to SEQ ID NO: 1921
  CDS (1)..(123)

SEQ ID NO: 2028 - protein, 41 aa, Bacillus weihenstephanensis; identical to SEQ ID NO: 1922

SEQ ID NO: 2029 - DNA, 129 bp, Bacillus timonensis
  CDS (1)..(129)
atgaaaaaagattggaacaaaccaacactattagtattagatgtaaaaatgacaatggctggtcaagatggacctgcaactgatgcagcgtttccaaatggtactctcaagggagatttaacattttgt

SEQ ID NO: 2030 - protein, 43 aa, Bacillus timonensis
MKKDWNKPTLLVLDVKMTMAGQDGPATDAAFPNGTLKGDLTFC

SEQ ID NO: 2031 - DNA, 132 bp, Gorillibacterium massiliense
  CDS (1)..(132)
atgtccaaaaaagaatggatccaaccgtccttggaggaactcagcatcaaaatgaccctgcaaggttctgcatccactgaaatcgacgccactttctctgacgtcaatgaaacggtacatctgcacgggagc

SEQ ID NO: 2032 - protein, 44 aa, Gorillibacterium massiliense
MSKKEWIQPSLEELSIKMTLQGSASTEIDATFSDVNETVHLHGS

SEQ ID NO: 2033 - DNA, 105 bp, Bacillus pseudalcaliphilus
  CDS (1)..(105)
atgctagatatttccttaaccatggcacaaacaactaatggtccttttacagatgaggcatatgtacctggagagtggtcagaagaccctcgttttacaccgagc

SEQ ID NO: 2034 - protein, 35 aa, Bacillus pseudalcaliphilus
MLDISLTMAQTTNGPFTDEAYVPGEWSEDPRFTPS

SEQ ID NO: 2035 - DNA, 78 bp, Bacillus endophyticus
  CDS (1)..(78)
atggcaggacctgggctaagctaccctgatgcagtgcaaccagatccagatccagaggacgcaatgcatcatgatagt

SEQ ID NO: 2036 - protein, 26 aa, Bacillus endophyticus
MAGPGLSYPDAVQPDPDPEDAMHHDS

SEQ ID NO: 2037 - DNA, 78 bp, Bacillus endophyticus; identical to SEQ ID NO: 2035
  CDS (1)..(78)

SEQ ID NO: 2038 - protein, 26 aa, Bacillus endophyticus
MAGPGLSYPDAVQPDPDPEDAMHHDS

SEQ ID NO: 2039 - DNA, 123 bp, Paenibacillus sp.
  CDS (1)..(123)
atgaagaaagaatggcaagcacccgctttagaaatccttgatgtgaacatgacgatggcaggtcccggcgaagcactcccggacggagtacaaccagatccagacgaaactgtacatcatagc

SEQ ID NO: 2040 - protein, 41 aa, Paenibacillus sp.
MKKEWQAPALEILDVNMTMAGPGEALPDGVQPDPDETVHHS

SEQ ID NO: 2041 - DNA, 123 bp, Paenibacillus sp.
  CDS (1)..(123)
atgaaaaaggaatacagcaagcctgctttggaagtgctcgacgttaaaatgactatggctggaccaggatttaaactcgccgactccttccaagatgatccggatgagatcgtgcactactcc

SEQ ID NO: 2042 - protein, 41 aa, Paenibacillus sp.
MKKEYSKPALEVLDVKMTMAGPGFKLADSFQDDPDEIVHYS

SEQ ID NO: 2043 - DNA, 207 bp, Cohnella thermotolerans
  CDS (1)..(207)
atggcagacgcccgagctcgaaacgctgaacgtcagcgaaacgatgtacgggaaaggcatgacgaatatcgacttcgtcacgacagaagacatggacatttactctccgagttgatcggcagcttcctcatcttgcgtccttatacaatccgttccggacggtataaggacgccgcctttccatttgccagaaaaaagcgaggaagg

SEQ ID NO: 2044 - protein, 69 aa, Cohnella thermotolerans
MADARARNAERQRNDVRERHDEYRLRHDRRHGHLLSELIGSFLILRPYTIRSGRYKDAAFPFARKKRGR

SEQ ID NO: 2045 - DNA, 138 bp, Cohnella thermotolerans
  CDS (1)..(138)
atggagaagcaagcgaagaacgaatggctgcagccggttctggaagtgctcgacgccagccagacgatgggcgggcctaacggcatctaccccgataaaaacgggaaaggccacaataacggtcatccccatgcctcg

SEQ ID NO: 2046 - protein, 46 aa, Cohnella thermotolerans
MEKQAKNEWLQPVLEVLDASQTMGGPNGIYPDKNGKGHNNGHPHAS

SEQ ID NO: 2047 - DNA, 123 bp, Paenibacillus sp.
  CDS (1)..(123)
atgaagaaggaatacagcaagcctgaattggaagtgctcgacgtcaaaatgacaatggctggacctggtatcgctatcgtcgactcattccaggatgatccagatgaaattcaacactactcc

SEQ ID NO: 2048 - protein, 41 aa, Paenibacillus sp.
MKKEYSKPELEVLDVKMTMAGPGIAIVDSFQDDPDEIQHYS

SEQ ID NO: 2049 - DNA, 123 bp, Bacillus muralis
  CDS (1)..(123)
atgaaaaaggagtgggaaaaaccaaagttagaaatacttaatgttaacatgacaatggctggaccaggaaggaggcttccggatgcgatacagccagatccagatgatccggtaaaattcagc

SEQ ID NO: 2050 - protein, 41 aa, Bacillus muralis
MKKEWEKPKLEILNVNMTMAGPGRRLPDAIQPDPDDPVKFS

SEQ ID NO: 2051 - DNA, 123 bp, Paenibacillus lactis
  CDS (1)..(123)
atgaaaaaagaatggaacgtaccttcccttgaaattcttgatgtcaacatgacaatggcgggtcctggaagctcactcccggatgcagttcaaccggatccagacgagcacgtcaactatagc

SEQ ID NO: 2052 - protein, 41 aa, Paenibacillus lactis
MKKEWNVPSLEILDVNMTMAGPGSSLPDAVQPDPDEHVNYS

SEQ ID NO: 2053 - DNA, 135 bp, Alicyclobacillus ferrooxydans
  CDS (1)..(135)
atgaaaaagaattggaaaaaaccggaaatagaagtattggatgtaaacatgacaatgacatccctgaccgggaccaaagtgactgatcaagtctatccggcagatacttacattccgtcagagagggttattagt

SEQ ID NO: 2054 - protein, 45 aa, Alicyclobacillus ferrooxydans
MKKNWKKPEIEVLDVNMTMTSLTGTKVTDQVYPADTYIPSERVIS

SEQ ID NO: 2055 - DNA, 135 bp, Bacillus sp.
  CDS (1)..(135)
atggagaaattagaatggaaagaacctaagttagaagtgttagaagttagtaaaacaatggctagcacatttgataacaactcgttagataatacgtatccagctggaactgcatggggtgatctaggctggagt

SEQ ID NO: 2056 - protein, 45 aa, Bacillus sp.
MEKLEWKEPKLEVLEVSKTMASTFDNNSLDNTYPAGTAWGDLGWS

SEQ ID NO: 2057 - DNA, 135 bp, Bacillus sp.; identical to SEQ ID NO: 2055
  CDS (1)..(135)

SEQ ID NO: 2058 - protein, 45 aa, Bacillus sp.; identical to SEQ ID NO: 2056

SEQ ID NO: 2059 - DNA, 123 bp, Paenibacillus sp.
  CDS (1)..(123)
atgaaaaaggaatacagcaagcctgcattggaagttctggatgttaaaatgactatggctggacctgggatcgctattgccgactccttccaatcggatccggaagaaatcgttagtcactcc

SEQ ID NO: 2060 - protein, 41 aa, Paenibacillus sp.
MKKEYSKPALEVLDVKMTMAGPGIAIADSFQSDPEEIVSHS

SEQ ID NO: 2061 - DNA, 138 bp, Ornithinibacillus californiensis
gtggaatcgttgaagaaagaatggaagcagccggcattagaaatccttgattttcgttatacattaatgggtcctggaataagagatgttgattttacttacgaagatgaggatgaggtagcacatcttcataaaagc

SEQ ID NO: 2062 - protein, 46 aa, Ornithinibacillus californiensis
MESLKKEWKQPALEILDFRYTLMGPGIRDVDFTYEDEDEVAHLHKS

SEQ ID NO: 2063 - DNA, 123 bp, Paenibacillus sp.; identical to SEQ ID NO: 2059
  CDS (1)..(123)

SEQ ID NO: 2064 - protein, 41 aa, Paenibacillus sp.; identical to SEQ ID NO: 2060

SEQ ID NO: 2065 - DNA, 123 bp, Paenibacillus sp.
  CDS (1)..(123)
atgaaaaaggaatacagcaagcctgcattggaagttctggatgttaaaatgactatggctggacctgggatcgctattgccgactccttccaatcggatccggaagaaatcgttaatcactcc

SEQ ID NO: 2066 - protein, 41 aa, Paenibacillus sp.
MKKEYSKPALEVLDVKMTMAGPGIAIADSFQSDPEEIVNHS

SEQ ID NO: 2067 - DNA, 123 bp, Paenibacillus sp.
  CDS (1)..(123)
atgaaaaaggaatacagcaagcctgctttggaagtgctcgacgtgaaaatgactatggctggaccaggaatatctattgccgactccttccaagatgatccggatgagatcgtacattattcc

SEQ ID NO: 2068 - protein, 41 aa, Paenibacillus sp.
MKKEYSKPALEVLDVKMTMAGPGISIADSFQDDPDEIVHYS

SEQ ID NO: 2069 - DNA, 123 bp, Paenibacillus sp.
  CDS (1)..(123)
atgaaaaaggaatacagcaagcctgcattggaagtgttggatgtgaaaatgactatggctggcccgggggtatccattgccgatgcgttccaagccgatccagatgaaatcgttagtcactcc

SEQ ID NO: 2070 - protein, 41 aa, Paenibacillus sp.
MKKEYSKPALEVLDVKMTMAGPGVSIADAFQADPDEIVSHS

SEQ ID NO: 2071 - DNA, 123 bp, Paenibacillus camerounensis
  CDS (1)..(123)
atgaaaaaggaatacagcaagcctgctttggaagtactcgacgttaagatgactatggctggaccgggactggcaatcgccgactccttccaaagtgatccggatgagatcgtacatcactcc

SEQ ID NO: 2072 - protein, 41 aa, Paenibacillus camerounensis
MKKEYSKPALEVLDVKMTMAGPGLAIADSFQSDPDEIVHHS

SEQ ID NO: 2073 - DNA, 123 bp, Paenibacillus camerounensis; identical to SEQ ID NO: 2071
  CDS (1)..(123)

SEQ ID NO: 2074 - protein, 41 aa, Paenibacillus camerounensis; identical to SEQ ID NO: 2072

SEQ ID NO: 2075 - DNA, 129 bp, Jeotgalibacillus campisalis
  CDS (1)..(129)
atgaaaaaggaatggaaaacaccagaagttgaattgctgacagttcaaatgacgatgcttggacataatggagacgatttggataacgattttgaagacggcacacctcgtggcgatcttactttcagc

SEQ ID NO: 2076 - protein, 43 aa, Jeotgalibacillus campisalis
MKKEWKTPEVELLTVQMTMLGHNGDDLDNDFEDGTPRGDLTFS

SEQ ID NO: 2077 - DNA, 126 bp, Paenibacillus polymyxa; identical to SEQ ID NO: 829
  CDS (1)..(126)

SEQ ID NO: 2078 - protein, 42 aa, Paenibacillus polymyxa; identical to SEQ ID NO: 830

SEQ ID NO: 2079 - DNA, 123 bp, Paenibacillus camerounensis; identical to SEQ ID NO: 2071
  CDS (1)..(123)

SEQ ID NO: 2080 - protein, 41 aa, Paenibacillus camerounensis; identical to SEQ ID NO: 2072

SEQ ID NO: 2081 - DNA, 129 bp, Paenibacillus sp.
  CDS (1)..(129)
atggaaaaaaaggaatggcaagcaccagcactggaagtattggaagtgaaccaaacaatggcgggcgtaggttacaaacagatcgactggattactgtccacgatgctgatctctacgatccaacttcc

SEQ ID NO: 2082 - protein, 43 aa, Paenibacillus sp.
MEKKEWQAPALEVLEVNQTMAGVGYKQIDWITVHDADLYDPTS

SEQ ID NO: 2083 - DNA, 126 bp, Paenibacillus sp.
  CDS (1)..(126)
atggaaaaaaaggaatggcaagcaccagcactggaaatattggaagtcaaccaaacaatggcgggcacaggttacaaacatatcgactgggttacggttcacgatgcggatctctacggaacaagt

SEQ ID NO: 2084 - protein, 42 aa, Paenibacillus sp.
MEKKEWQAPALEILEVNQTMAGTGYKHIDWVTVHDADLYGTS

SEQ ID NO: 2085 - DNA, 129 bp, Paenibacillus sp.
  CDS (1)..(129)
atggaaaaaaaggaatggcaagcaccagctcttgaagtgttggaagtcaatcaaacaatggccggtactggctacagacaaattgactggatcacggttcacgatgcggatctgtacgatccaacttcc

SEQ ID NO: 2086 - protein, 43 aa, Paenibacillus sp.
MEKKEWQAPALEVLEVNQTMAGTGYRQIDWITVHDADLYDPTS

SEQ ID NO: 2087 - DNA, 132 bp, Paenibacillus sp.
  CDS (1)..(132)
atgcaaaagaaagaatggctagcaccagcactggaagtgttggaagtgaaccaaaccatggcgggaacaggatacagacaaattgactggataactgttcacgatgctgacatgtacgacccgcctacttcc

SEQ ID NO: 2088 - protein, 44 aa, Paenibacillus sp.
MQKKEWLAPALEVLEVNQTMAGTGYRQIDWITVHDADMYDPPTS

SEQ ID NO: 2089 - DNA, 123 bp, Paenibacillus sp.; identical to SEQ ID NO: 2069
  CDS (1)..(123)

SEQ ID NO: 2090 - protein, 41 aa, Paenibacillus sp.; identical to SEQ ID NO: 2070

SEQ ID NO: 2091 - DNA, 129 bp, Paenibacillus sp.
  CDS (1)..(129)
atggaaaaaaaggaatggcaagcaccagctcttgaagtgttggaagtcaatcaaacgatggccggtactggctacagacaaattgactgggtaacggttcacgatgcggatctgtacgatccaacttcc

SEQ ID NO: 2092 - protein, 43 aa, Paenibacillus sp.
MEKKEWQAPALEVLEVNQTMAGTGYRQIDWVTVHDADLYDPTS

SEQ ID NO: 2093 - DNA, 126 bp, Paenibacillus sp.
  CDS (1)..(126)
atggaaaaaaaggaatggcaagcaccagcactggaaatattggaagtcaaccaaacaatggcgggcgcaggttacaaacatatcgactgggttacggttcacgatgcggatctctacggaactagt

SEQ ID NO: 2094 - protein, 42 aa, Paenibacillus sp.
MEKKEWQAPALEILEVNQTMAGAGYKHIDWVTVHDADLYGTS

SEQ ID NO: 2095 - DNA, 123 bp, Paenibacillus camerounensis; identical to SEQ ID NO: 2071
  CDS (1)..(123)

SEQ ID NO: 2096 - protein, 41 aa, Paenibacillus camerounensis; identical to SEQ ID NO: 2072

SEQ ID NO: 2097 - DNA, 138 bp, Paenibacillus sp.
  CDS (1)..(138)
atgcaaatcgaaaaaaagcaatggcaagctccagcacttgaagttttggaagtaaaccaaaccctcgcaggtaaaggttacagacaaatcgactggatcacagaacacgatgctgatctgtatgatccacctgtttcc

SEQ ID NO: 2098 - protein, 46 aa, Paenibacillus sp.
MQIEKKQWQAPALEVLEVNQTLAGKGYRQIDWITEHDADLYDPPVS

SEQ ID NO: 2099 - DNA, 207 bp, Cohnella thermotolerans; identical to SEQ ID NO: 2043
  CDS (1)..(207)

SEQ ID NO: 2100 - protein, 69 aa, Cohnella thermotolerans; identical to SEQ ID NO: 2044

SEQ ID NO: 2101 - DNA, 135 bp, Cohnella thermotolerans
  CDS (1)..(135)
atggaaatccgcgcgaaacaagaatggcagacgcccgagctcgaaacgctgaacgtcagcgaaacgatgtacgggaaaggcatgacgaatatcgacttcgtcacgacagaagacatggacatttactctccgagt

SEQ ID NO: 2102 - protein, 45 aa, Cohnella thermotolerans
MEIRAKQEWQTPELETLNVSETMYGKGMTNIDFVTTEDMDIYSPS

SEQ ID NO: 2103 - DNA, 126 bp, Paenibacillus polymyxa; identical to SEQ ID NO: 943
  CDS (1)..(126)

SEQ ID NO: 2104 - protein, 42 aa, Paenibacillus polymyxa; identical to SEQ ID NO: 944

SEQ ID NO: 2105 - DNA, 123 bp, Bacillus gobiensis
  CDS (1)..(123)
atgaaaaagacttggaacgagcctactcttgaagtattgaacatgaatcaaacaatggctggtaaaggtactacttgcattgacattgtctctgacgatgacttagacatcaccaaccctagc

SEQ ID NO: 2106 - protein, 41 aa, Bacillus gobiensis
MKKTWNEPTLEVLNMNQTMAGKGTTCIDIVSDDDLDITNPS

SEQ ID NO: 2107 - DNA, 126 bp, Paenibacillus dendritiformis
  CDS (1)..(126)
atgaaaaagcagtacagcaagccgtcccttgaagtgttggatgttcatcagaccatggctggcccgggtacctctaccccggatgctttccagccggacccggatgaagacgtgcattacgatagc

SEQ ID NO: 2108 - protein, 42 aa, Paenibacillus dendritiformis
MKKQYSKPSLEVLDVHQTMAGPGTSTPDAFQPDPDEDVHYDS

SEQ ID NO: 2109 - DNA, 123 bp, Fictibacillus macauensis
  CDS (1)..(123)
atgaaaaaagagtggaacacaccagtattagaagtacttgatgtaaacatgacaatggctggacctggtctcagaatcgctgacgcagtgcaaccggatgaagacgaaacggtacactacagc

SEQ ID NO: 2110 - protein, 41 aa, Fictibacillus macauensis
MKKEWNTPVLEVLDVNMTMAGPGLRIADAVQPDEDETVHYS

SEQ ID NO: 2111 - DNA, 132 bp, Bacillus bogoriensis
  CDS (1)..(132)
atgaaaaaagaatggcaaacaccatcactagaagtgttagaagtacaaatgacgatggctaatccaaataatggggatcatcttgaccaaacttatccagatggaacaccgagagaagatttgacatggagt

SEQ ID NO: 2112 - protein, 44 aa, Bacillus bogoriensis
MKKEWQTPSLEVLEVQMTMANPNNGDHLDQTYPDGTPREDLTWS

SEQ ID NO: 2113 - DNA, 117 bp, Paenibacillus sp.
  CDS (1)..(117)
atggaatggcaaatacctagccttgaagttcttgaaatgagtgagactaagcaaggaactggattcagacaaattgactggatctccgagcatgatgcggatttgtatgatcctagc

SEQ ID NO: 2114 - protein, 39 aa, Paenibacillus sp.
MEWQIPSLEVLEMSETKQGTGFRQIDWISEHDADLYDPS

SEQ ID NO: 2115 - DNA, 132 bp, Paenibacillus harenae; identical to SEQ ID NO: 1993
  CDS (1)..(132)

SEQ ID NO: 2116 - protein, 44 aa, Paenibacillus harenae; identical to SEQ ID NO: 1994

SEQ ID NO: 2117 - DNA, 132 bp, Bacillus bogoriensis; identical to SEQ ID NO: 2111
  CDS (1)..(132)

SEQ ID NO: 2118 - protein, 44 aa, Bacillus bogoriensis; identical to SEQ ID NO: 2112

SEQ ID NO: 2119 - DNA, 126 bp, Thermobacillus composti
  CDS (1)..(126)
atgcgcaagaaggaatggcagacgcccgaactggaagtgctggacgttcggttgacggcggctggtccgggtaaggcgaaaccggacgccgtgcagccggatgaagacgaaatcgtgcactacagc

SEQ ID NO: 2120 - protein, 42 aa, Thermobacillus composti
MRKKEWQTPELEVLDVRLTAAGPGKAKPDAVQPDEDEIVHYS

SEQ ID NO: 2121 - DNA, 111 bp, Paenibacillus sp.; identical to SEQ ID NO: 1909
  CDS (1)..(111)

SEQ ID NO: 2122 - protein, 37 aa, Paenibacillus sp.; identical to SEQ ID NO: 1910

SEQ ID NO: 2123 - DNA, 123 bp, Jeotgalibacillus malaysiensis
  CDS (1)..(123)
atgaagaaaaaatggacaacgatttcgttagaatctattgaagttgataaaacatttgccggtccagggaaaagaattgcagacgaataccagtgtgatccagatgagacagtgaattacagt

SEQ ID NO: 2124 - protein, 41 aa, Jeotgalibacillus malaysiensis
MKKKWTTISLESIEVDKTFAGPGKRIADEYQCDPDETVNYS

SEQ ID NO: 2125 - DNA, 144 bp, Clostridium scatologenes
  CDS (1)..(144)
atggaaaagaaaatttggaatccaccagaatttttggaattaggagttcaaagtactgaaaaaagcaaaacgtggcaagggggtgttgatgcaacttggactgatggtagtggcaatacttgggagtcacactcaggtactatg

SEQ ID NO: 2126 - protein, 48 aa, Clostridium scatologenes
MEKKIWNPPEFLELGVQSTEKSKTWQGGVDATWTDGSGNTWESHSGTM

SEQ ID NO: 2127 - DNA, 132 bp, Clostridium saccharobutylicum
  CDS (1)..(132)
atgtggattgaaccagagattattgacttatctgtaaaagagactaaactaggcagtcatttctcaagcactccagatggagcaccatggcaagatgcaaatggtgactggcaagaaccacatggaaaatct

SEQ ID NO: 2128 - protein, 44 aa, Clostridium saccharobutylicum
MWIEPEIIDLSVKETKLGSHFSSTPDGAPWQDANGDWQEPHGKS

SEQ ID NO: 2129 - DNA, 126 bp, Streptococcus pneumoniae; identical to SEQ ID NO: 1579
  CDS (1)..(126)

SEQ ID NO: 2130 - protein, 42 aa, Streptococcus pneumoniae; identical to SEQ ID NO: 1580

SEQ ID NO: 2131 - DNA, 123 bp, Bacillus boroniphilus; identical to SEQ ID NO: 2005
  CDS (1)..(123)

SEQ ID NO: 2132 - protein, 41 aa, Bacillus boroniphilus; identical to SEQ ID NO: 2006

SEQ ID NO: 2133 - DNA, 123 bp, Bacillus boroniphilus; identical to SEQ ID NO: 2005
  CDS (1)..(123)

SEQ ID NO: 2134 - protein, 41 aa, Bacillus boroniphilus; identical to SEQ ID NO: 2006

SEQ ID NO: 2135 - DNA, 198 bp, Rivularia sp.
  CDS (1)..(198)
atgtctaagaaagtatacagcagacccgaattaagcgcttacggtgaatttgcaaacttgactcaacgcaccggttccggttttgctgacttcgaaggatctaccgacactggagttggtactgttacaactggtgctgaccctaacacttccgtaatcaataccccaaccggttctgttaactttactcctgcaagc

SEQ ID NO: 2136 - protein, 66 aa, Rivularia sp.
MSKKVYSRPELSAYGEFANLTQRTGSGFADFEGSTDTGVGTVTTGADPNTSVINTPTGSVNFTPAS

SEQ ID NO: 2137 - DNA, 177 bp, Lachnoclostridium phytofermentans
  CDS (1)..(177)
atgaaaaaggtatgggctaacccagaagttatcgaattagaaattaacaagacccagtacagtccaagaggtggatgggaaaaagatggcgaatatgtatcttctgatggcaagtatcatataactacttggggaccatcttcaggaaatagtggagagccatctgttggtgttaat

SEQ ID NO: 2138 - protein, 59 aa, Lachnoclostridium phytofermentans
MKKVWANPEVIELEINKTQYSPRGGWEKDGEYVSSDGKYHITTWGPSSGNSGEPSVGVN

SEQ ID NO: 2139 - DNA, 159 bp, Halomonas anticariensis
  CDS (1)..(159)
atgctagagttgaagcatgcaggggggaagggcgagtatgttcctcccgccgttttgcaactagggtcatcagctgacattacagcggctgggacggctatgaactctgatgatggagaaaatccagacacggcttttgacggggtgaccagcccatcc

SEQ ID NO: 2140 - protein, 53 aa, Halomonas anticariensis
MLELKHAGGKGEYVPPAVLQLGSSADITAAGTAMNSDDGENPDTAFDGVTSPS

SEQ ID NO: 2141 - DNA, 159 bp, Halomonas anticariensis
  CDS (1)..(159)
atgcgagaactagataaggcaaggggaaagggtgagtatgtcccacctattttattacgactggggtcatcggctgacatcaccgctgcccaaatgcaggcgaattccgatgatggagtcaatgccgacaacgctttcccaaacccgacagagtcatct

SEQ ID NO: 2142 - protein, 53 aa, Halomonas anticariensis
MRELDKARGKGEYVPPILLRLGSSADITAAQMQANSDDGVNADNAFPNPTESS

SEQ ID NO: 2143 - DNA, 159 bp, Halomonas anticariensis
  CDS (1)..(159)
atgcctgagtcgaaaggtacaggagggaaaggggagtatgctgcacctgtcgtgttacgactgggctcatcggctgtcataaccgctgcccaaatgcaagcgaattccgatgatgcaatcagtcccgacaacgccttcccgaacccgacagagtcatcc

SEQ ID NO: 2144 - protein, 53 aa, Halomonas anticariensis
MPESKGTGGKGEYAAPVVLRLGSSAVITAAQMQANSDDAISPDNAFPNPTESS

SEQ ID NO: 2145 - DNA, 162 bp, Unknown
  Description of Unknown: Candidate division sequence
  CDS (1)..(162)
atgtgttctgaacgtgtcgatcggttcgaagacaggaaggcacaaaagaaaagcaggaaaatatacgccacgccgaagctgaccgtccacggtggcgttgagcacatcacacagcagataggggatacgggatctgacctctttgtcggctcggtagttggc

SEQ ID NO: 2146 - protein, 54 aa, Unknown
  Description of Unknown: Candidate division sequence
MCSERVDRFEDRKAQKKSRKIYATPKLTVHGGVEHITQQIGDTGSDLFVGSVVG

SEQ ID NO: 2147 - DNA, 174 bp, Unknown
  Description of Unknown: Candidate division sequence
  CDS (1)..(174)
atgaccactgaaggcaaggactggctcggaaagaacacaaccgaagggcaaagaggaaagccgtatgctgcgccgaagctggttgtccacggcagcgccgagcgcatcacgcaatatggtggcggacaggaagccgatgttcagatgggctcgatgcttgagttggcaccgaaa

SEQ ID NO: 2148 - protein, 58 aa, Unknown
  Description of Unknown: Candidate division sequence
MTTEGKDWLGKNTTEGQRGKPYAAPKLVVHGSAERITQYGGGQEADVQMGSMLELAPK

SEQ ID NO: 2149 - DNA, 165 bp, Unknown
  Description of Unknown: Candidate division sequence
  CDS (1)..(165)
atgcacgctgaaagcggagaccgtttcgagaagaacacggcgcaagagcggagcaagaagccttacgcgaccccgagattgagcgaccacggcacggtcgaggagattacacgaggcacagcaccggggtcagcagacgcggttgccccgggctcacccgcgtta

SEQ ID NO: 2150 - protein, 55 aa, Unknown
  Description of Unknown: Candidate division sequence
MHAESGDRFEKNTAQERSKKPYATPRLSDHGTVEEITRGTAPGSADAVAPGSPAL

SEQ ID NO: 2151 - DNA, 165 bp, Unknown
  Description of Unknown: Candidate division sequence
  CDS (1)..(165)
atgactaccgacagcgacgagcggctcgacaggaaaaccgcggaagagcaaacaagaaagccgtacgctgtgcctgaactgagcgttcacggcacggtcgaggagatcacacagcaacttgcgggcgcggcgggcgatggcttgggcggctcgcctccgccatac

SEQ ID NO: 2152 - protein, 55 aa, Unknown
  Description of Unknown: Candidate division sequence
MTTDSDERLDRKTAEEQTRKPYAVPELSVHGTVEEITQQLAGAAGDGLGGSPPPY

SEQ ID NO: 2153 - DNA, 165 bp, Unknown
  Description of Unknown: Candidate division sequence
  CDS (1)..(165)
atgagctcctggaagctagatagtctccggaaacacgcggtgcagcacaggccgaaaaagccttatgccacgccaaagctgaccgttcacggcgacatagagaagatcacgctgaatattgggacgggggcggttgatctcttggacggttcccagattagtgga

SEQ ID NO: 2154 - protein, 55 aa, Unknown
  Description of Unknown: Candidate division sequence
MSSWKLDSLRKHAVQHRPKKPYATPKLTVHGDIEKITLNIGTGAVDLLDGSQISG

SEQ ID NO: 2155 - DNA, 177 bp, Unknown
  Description of Unknown: Candidate division sequence
  CDS (1)..(177)
atgactactgacagcgacgagcggcttgaccggaaagctgcggaagagcaaacaagaaagccctacgcgacgccgaagttgatcgtccacggcagcgccgagcgcatcacgcaagccggtgggggacagggagccgatattcagatgggctccgtgattgatctggtaataaaggcg

SEQ ID NO: 2156 - protein, 59 aa, Unknown
  Description of Unknown: Candidate division sequence
MTTDSDERLDRKAAEEQTRKPYATPKLIVHGSAERITQAGGGQGADIQMGSVIDLVIKA

SEQ ID NO: 2157 - DNA, 129 bp, Gracilibacillus boraciitolerans
  CDS (1)..(129)
atgaaacaagaatggaatgcgccacagttggaagtacttgatgtaaaggagacaatgttgggaccaggatataaatttgttgattttactttcagtgatattgatgaagtaggagaaattcatgctagt

SEQ ID NO: 2158 - protein, 43 aa, Gracilibacillus boraciitolerans
MKQEWNAPQLEVLDVKETMLGPGYKFVDFTFSDIDEVGEIHAS

SEQ ID NO: 2159 - DNA, 180 bp, Nostoc piscinale
  CDS (1)..(180)
atgaaaaaaacttacgaagcacccaaattaacaaactacggtagtgttgaaaacattacccacgcttttggtagaccaggtccaaaagatactttccaaatcggtaacgatcctactcagattcctggtgaagtactaggactagatggttctcaaaatggggtacttattccccaacca

SEQ ID NO: 2160 - protein, 60 aa, Nostoc piscinale
MKKTYEAPKLTNYGSVENITHAFGRPGPKDTFQIGNDPTQIPGEVLGLDGSQNGVLIPQP

SEQ ID NO: 2161 - DNA, 129 bp, Gracilibacillus boraciitolerans; identical to SEQ ID NO: 2157
  CDS (1)..(129)

SEQ ID NO: 2162 - protein, 43 aa, Gracilibacillus boraciitolerans; identical to SEQ ID NO: 2158

SEQ ID NO: 2163 - DNA, 192 bp, Nostoc sp.
  CDS (1)..(192)
atgaaaaaagcttacgaagctcccaaattaacaaactacggtagtgttcaaaacgttacacatgcgtttggtagaccaggagaaacggatactttccaaatcggtgacaatcctactcagtttcctggcgaagtactagggctagaaggttccgttaatggggtacttaatcccgtaccccgcgtaccccga

SEQ ID NO: 2164 - protein, 64 aa, Nostoc sp.
MKKAYEAPKLTNYGSVQNVTHAFGRPGETDTFQIGDNPTQFPGEVLGLEGSVNGVLNPVPRVPR

SEQ ID NO: 2165 - DNA, 117 bp, Crinalium epipsammum
  CDS (1)..(117)
atgcccgctctaacgatttatggcaacttggaagttttgacacaaggaggtaaggatggagaacagttagatgctagctttcccgttaatactccgaaaggaaagttaacattttca

SEQ ID NO: 2166 - protein, 39 aa, Crinalium epipsammum
MPALTIYGNLEVLTQGGKDGEQLDASFPVNTPKGKLTFS

SEQ ID NO: 2167 - DNA, 138 bp, Acaryochloris sp.
  CDS (1)..(138)
atgaaaaaattttatgactcacctcaactcagaacctacggaagcgtagaagatatgacgaagaatgcgccatcaatcaatgctattgatgtgccatttggaaccattcctgccggagatattgacgacattacatcc

SEQ ID NO: 2168 - protein, 46 aa, Acaryochloris sp.
MKKFYDSPQLRTYGSVEDMTKNAPSINAIDVPFGTIPAGDIDDITS

SEQ ID NO: 2169 - DNA, 138 bp, Acaryochloris sp.
  CDS (1)..(138)
atgaagagaacttatggtgcaccccaattgaaggtgtacggcagcgtagaggatatgactaagaattcaccgtcattgaatgctacagatgtgcctttcgggacaatccccgctggtgatattgatgatgtaacgtca

SEQ ID NO: 2170 - protein, 46 aa, Acaryochloris sp.
MKRTYGAPQLKVYGSVEDMTKNSPSLNATDVPFGTIPAGDIDDVTS

SEQ ID NO: 2171 - DNA, 105 bp, Methanobacterium lacus
  CDS (1)..(105)
atgaaaaaagtttacaaaaaaccagaattaaaagaacatggagatattaaatctttgacgaaaggtggagatataggaggatttgatcaagataatgctgctagt

SEQ ID NO: 2172 - protein, 35 aa, Methanobacterium lacus
MKKVYKKPELKEHGDIKSLTKGGDIGGFDQDNAAS

SEQ ID NO: 2173 - DNA, 108 bp, Methanobacterium arcticum
ttgaagaaaaaatatgaaaaacccgaattaaaaaaacatggtgatcttaaaaaaattactaaaggttttggtgtaggaggagcagatatgcagggtggtccagaaagc

SEQ ID NO: 2174 - protein, 36 aa, Methanobacterium arcticum
MKKKYEKPELKKHGDLKKITKGFGVGGADMQGGPES

SEQ ID NO: 2175 - DNA, 210 bp, Hassallia byssoidea
  CDS (1)..(210)
atgaagaaaagctacgaagtaccacaactggttaaacacggaagcgtcagcaatatcacggcttactctttcgacagtaaagacggcgatgtattttacggtcagacaaacgcaacaaaccaaaatggtactggttcactgaatgcttgcataacctacaaaaccggtctgaagaaaggtgattgcgtgaatccttccgcgaagggtgtg

SEQ ID NO: 2176 - protein, 70 aa, Hassallia byssoidea
MKKSYEVPQLVKHGSVSNITAYSFDSKDGDVFYGQTNATNQNGTGSLNACITYKTGLKKGDCVNPSAKGV

SEQ ID NO: 2177 - DNA, 210 bp, Hassallia byssoidea
  CDS (1)..(210)
atgaagaaaagctacgaagcaccacaactcgtcaaacacggaagcgtcagcaatatcacggcttactctttcgacagtaaagacggcgatgtattttacggtcagacgaacgcaacaaaccaaaatggtactggttcactgaatgcttgcataacctacaaaaccggtccgaagaaaggtgattgcgtgaatccttccgcgaagggtgtg

SEQ ID NO: 2178 - protein, 70 aa, Hassallia byssoidea
MKKSYEAPQLVKHGSVSNITAYSFDSKDGDVFYGQTNATNQNGTGSLNACITYKTGPKKGDCVNPSAKGV

SEQ ID NO: 2179 - DNA, 138 bp, Acaryochloris marina
  CDS (1)..(138)
atgaaaaaattttatgacgcacctcaactcagaacctacggaagcgtagaagatatgacgaagaatgcgccatcaatcaatgccattgatgtgccctttggaaccattcctcctggagatatcgacgacattacatcc

SEQ ID NO: 2180 - protein, 46 aa, Acaryochloris marina
MKKFYDAPQLRTYGSVEDMTKNAPSINAIDVPFGTIPPGDIDDITS

SEQ ID NO: 2181 - DNA, 138 bp, Acaryochloris marina
  CDS (1)..(138)
atgaaaagaacctatggtgcaccccaattgaaggtgtacggcagcgtagaagatatgactaagaattcaccgtcattgaatgctacagatgtgcctttcgggacaattcccgttggtgatattgatgatgtaacgtca

SEQ ID NO: 2182 - protein, 46 aa, Acaryochloris marina
MKRTYGAPQLKVYGSVEDMTKNSPSLNATDVPFGTIPVGDIDDVTS

SEQ ID NO: 2183 - DNA, 129 bp, Methanobacterium formicicum
  CDS (1)..(129)
atgatacaaaaaggcatttacaaaaaacccaaactgattacccatggcaatgtggatgacattactcttggaacagctccaggtggactcgaagaacccgggggtaaacaaccttcaggtggtccagtt

SEQ ID NO: 2184 - protein, 43 aa, Methanobacterium formicicum
MIQKGIYKKPKLITHGNVDDITLGTAPGGLEEPGGKQPSGGPV

SEQ ID NO: 2185 - DNA, 117 bp, Methanobacterium formicicum
  CDS (1)..(117)
atgtccattaaagaaaaaaaatgttataaaaaacctgaaataaaaattcatggagatttaagaaaaataacaaaagacaaatctggattaggtggagatgcagggggactagcatct

SEQ ID NO: 2186 - protein, 39 aa, Methanobacterium formicicum
MSIKEKKCYKKPEIKIHGDLRKITKDKSGLGGDAGGLAS

SEQ ID NO: 2187 - DNA, 138 bp, Stanieria cyanosphaera
  CDS (1)..(138)
atgagcaaaaaagcatacactcaacctcaactatccgttcacggtaacgttgaaactttaactcaaaaaactaaagtaggaacaaagctagatgctagttttgaagcaggtactcctctgactgaacttactatttcc

SEQ ID NO: 2188 - protein, 46 aa, Stanieria cyanosphaera
MSKKAYTQPQLSVHGNVETLTQKTKVGTKLDASFEAGTPLTELTIS

SEQ ID NO: 2189 - DNA, 126 bp, Methanobacterium paludis
  CDS (1)..(126)
atgaaagacaaaaaatcgttgtatcaaaaacccgaactcaaaatttatggaaatttgaaagaacacactaaaggaactcaatctggcggagtagagaataactcatttagaccatccggtccagaa

SEQ ID NO: 2190 - protein, 42 aa, Methanobacterium paludis
MKDKKSLYQKPELKIYGNLKEHTKGTQSGGVENNSFRPSGPE

SEQ ID NO: 2191 - DNA, 123 bp, Rubellimicrobium mesophilum
  CDS (1)..(123)
atgtcggcctaccgggctccgaccctcaaggtcttcggcagcgtggtcgagctgaccgcgagcgggtccaagatcggcaaggaaggcaagggtcagcaatccatcggcgacacgcgcaagccc

SEQ ID NO: 2192 - protein, 41 aa, Rubellimicrobium mesophilum
MSAYRAPTLKVFGSVVELTASGSKIGKEGKGQQSIGDTRKP

SEQ ID NO: 2193 - DNA, 156 bp, Rubellimicrobium mesophilum
  CDS (1)..(156)
atgtcgaacaggctggattctctgcgggacggtcttcggacctatcgcgccccgaggctgatcgtcctcggccgcatggtcgagctgaccgcgagcggctcgcgcctgggcagggaaggcaagggccaccagtcctccgatagcagccgcaggccc

SEQ ID NO: 2194 - protein, 52 aa, Rubellimicrobium mesophilum
MSNRLDSLRDGLRTYRAPRLIVLGRMVELTASGSRLGREGKGHQSSDSSRRP

SEQ ID NO: 2195 - DNA, 171 bp, Nostoc sp.
  CDS (1)..(171)
atgaaaaaagcttacattgctcccaaattgacagttcacggtagtgttgaagatgttaccaatgcttttggaacacccggcgcaaatgatacagtgcaatttgccggtcaaactttccctggtgagctatttggtgccagtggttctataaacggtagtatcgaccctgca

SEQ ID NO: 2196 - protein, 57 aa, Nostoc sp.
MKKAYIAPKLTVHGSVEDVTNAFGTPGANDTVQFAGQTFPGELFGASGSINGSIDPA

SEQ ID NO: 2197 - DNA, 195 bp, Scytonema tolypothrichoides
  CDS (1)..(195)
atgaaaagttcttacactgctcccaagctgactgttcacggtaatgttgccgacattacacaaattactaatggtgatacaaggaaagattttctatttttgaacggtaccgttacatctgatggtaatgacctcggttcaaaagatgtctgccttggaacaactccaaaaggacctaactgcgatcctaaatac

SEQ ID NO: 2198 - protein, 65 aa, Scytonema tolypothrichoides
MKSSYTAPKLTVHGNVADITQITNGDTRKDFLFLNGTVTSDGNDLGSKDVCLGTTPKGPNCDPKY

SEQ ID NO: 2199 - DNA, 156 bp, Fischerella sp.
  CDS (1)..(156)
atgtttggtactagtaaacgagaagatttcttattcttcagtggtaatgcttcttcccccaacggaaccgttagtcttactggcggtacgggttctgtagacggtattctgtttaggtgcgatgagaacggtctaccagagaagtgcccaaagaag

SEQ ID NO: 2200 - protein, 52 aa, Fischerella sp.
MFGTSKREDFLFFSGNASSPNGTVSLTGGTGSVDGILFRCDENGLPEKCPKK

SEQ ID NO: 2201 - DNA, 192 bp, Leptolyngbya sp.
  CDS (1)..(192)
atgactaagaaaacatatactcagcctagcctgacagcttacggtagtgtagaaaaactaactaaagctaatggctctatcaatcttgcggatgtcttcatcctatctaacctacctggtgagcagcctgatccaattacggctgacggccagggctctatagatatcgagatcgatgttgaaggtgccatc

SEQ ID NO: 2202 - protein, 64 aa, Leptolyngbya sp.
MTKKTYTQPSLTAYGSVEKLTKANGSINLADVFILSNLPGEQPDPITADGQGSIDIEIDVEGAI

SEQ ID NO: 2203 - DNA, 105 bp, Butyrivibrio sp.
  CDS (1)..(105)
atggattgggagttcaaggatcagtggggcaacgtattccagagccacagcggaactgattataatgttgatcacagagagaatcgtgagcctgtagacgagcca

SEQ ID NO: 2204 - protein, 35 aa, Butyrivibrio sp.
MDWEFKDQWGNVFQSHSGTDYNVDHRENREPVDEP

SEQ ID NO: 2205 - DNA, 189 bp, Leptolyngbya sp.
  CDS (1)..(189)
atgactaagaaagcatatactcagcctagcctaactgcttacggtagtgtacaaacgctaaccaaaggtagtggcgctatcaacatcggagatagcgttattttcactaacctgcctggcggtgccaatgatctggaacttccaagcaatggttctgtagacgtaactattgactttgacgagctaact

SEQ ID NO: 2206 - protein, 63 aa, Leptolyngbya sp.
MTKKAYTQPSLTAYGSVQTLTKGSGAINIGDSVIFTNLPGGANDLELPSNGSVDVTIDFDELT

SEQ ID NO: 2207 - DNA, 117 bp, Methanobacterium sp.
  CDS (1)..(117)
atggatagtgaaaacaaaatagtttataaaaaacctaaagttgaaatacacggtaatatcaaaaccattacaaaaaaaagtggcagatatgatgatggggctaagcccgcctctcat

SEQ ID NO: 2208 - protein, 39 aa, Methanobacterium sp.
MDSENKIVYKKPKVEIHGNIKTITKKSGRYDDGAKPASH

SEQ ID NO: 2209 - DNA, 219 bp, Calothrix sp.
  CDS (1)..(219)
atgaagaaacaatacaacacgcccacacttattaatcacggttcagtacaaagtattactcaattaggaggtgggagtaaaagaaatgattttcttttctttagtgctgctgctgccgctgccgttggcgttaatccaaataccccagttctgacagctacaggttctacagatgctatcattaaattatgtaatgaacctggtgctaattgcccaaaa

SEQ ID NO: 2210 - protein, 73 aa, Calothrix sp.
MKKQYNTPTLINHGSVQSITQLGGGSKRNDFLFFSAAAAAAVGVNPNTPVLTATGSTDAIIKLCNEPGANCPK

SEQ ID NO: 2211 - DNA, 153 bp, Desulfocapsa sulfexigens
  CDS (1)..(153)
atgcctcctaaaaaattagagtattcaaaatctattcttattaatcatgggtctgttgtgaggctaactgctggatgtgcgggttcaggggccgattctggtacatatagtgagagttcatttattggtcccgatggttcatgtcagtcaact

SEQ ID NO: 2212 - protein, 51 aa, Desulfocapsa sulfexigens
MPPKKLEYSKSILINHGSVVRLTAGCAGSGADSGTYSESSFIGPDGSCQST

SEQ ID NO: 2213 - DNA, 141 bp, Erythrobacteraceae bacterium
  CDS (1)..(141)
atggccagctcgaccaaggcgacctatcagcgtcccacgctttccgtctacggcggctttgccaaactgaccgcggctggcagcgggttcttcagcgaaggccccaaccagggccccatggccaaggccacgcgcaagatc

SEQ ID NO: 2214 - protein, 47 aa, Erythrobacteraceae bacterium
MASSTKATYQRPTLSVYGGFAKLTAAGSGFFSEGPNQGPMAKATRKI

SEQ ID NO: 2215 - DNA, 162 bp, Candidatus Halobonum tyrrellensis
  CDS (1)..(162)
atgaaaggcagccaatcaaaccgggagtacacgtctcccgaagttaccgaattcggctcggttgaacagatcactgaaaagctaaacaagcaaggactgaagcctgaccagtacacggaggcgactaacggcgtcgtcgtcggttcgacccagccggcgaag

SEQ ID NO: 2216 - protein, 54 aa, Candidatus Halobonum tyrrellensis
MKGSQSNREYTSPEVTEFGSVEQITEKLNKQGLKPDQYTEATNGVVVGSTQPAK

SEQ ID NO: 2217 - DNA, 159 bp, Halopiger xanaduensis
  CDS (1)..(159)
atgtccggcaacaaagatagcagtcagtacagtccgcccgaactgactgaatacggctcgatcgaatcggtcacggaacaagtgaacaaggaaggagtggcgtccgaccagtggagtgagaacaccccgctcctcgggtccatccaacccgctccgacg

SEQ ID NO: 2218 - protein, 53 aa, Halopiger xanaduensis
MSGNKDSSQYSPPELTEYGSIESVTEQVNKEGVASDQWSENTPLLGSIQPAPT

SEQ ID NO: 2219 - DNA, 162 bp, Candidatus Halobonum tyrrellensis; identical to SEQ ID NO: 2215
  CDS (1)..(162)

SEQ ID NO: 2220 - protein, 54 aa, Candidatus Halobonum tyrrellensis; identical to SEQ ID NO: 2216

SEQ ID NO: 2221 - DNA, 141 bp, Oscillatoria sp.
  CDS (1)..(141)
atgaagagcgcagaaactaaagcaaacagccaaggcaaactgccttacaaaaaacccaccctaaccccatacggaagtatccaaaacatcactcaagggatatcgggaagcaatacggatgggatgggtggaaatcttgtt

SEQ ID NO: 2222 - protein, 47 aa, Oscillatoria sp.
MKSAETKANSQGKLPYKKPTLTPYGSIQNITQGISGSNTDGMGGNLV

SEQ ID NO: 2223 - DNA, 150 bp, Oscillatoria sp.
  CDS (1)..(150)
atgaagaacgcaggaaataaagcaaacagccaaggcaaactgccttacaaaaaacccactctaaccccctacggaagtatccaaaacatcactcaagcgacatcgggaagcaatacggatgggatggggggaaatatggcaccgccgtcg

SEQ ID NO: 2224 - protein, 50 aa, Oscillatoria sp.
MKNAGNKANSQGKLPYKKPTLTPYGSIQNITQATSGSNTDGMGGNMAPPS

SEQ ID NO: 2225 - DNA, 159 bp, Halosimplex carlsbadense
  CDS (1)..(159)
atggaaagagatacgagtgactacggtgtgcctgaactgaccgaatacgggtcggttgaggcgattacggaacagcaattcaacaaagacggcatgtcgaccgaccagtacactgacgacactaacggcgagatcgtgggatcgcttagcgagtatccc

SEQ ID NO: 2226 - protein, 53 aa, Halosimplex carlsbadense
MERDTSDYGVPELTEYGSVEAITEQQFNKDGMSTDQYTDDTNGEIVGSLSEYP

SEQ ID NO: 2227 - DNA, 189 bp, Tolypothrix campylonemoides
  CDS (1)..(189)
atgaaaaaaacttacaacgcacccaagctgacaaatcatggaagcgtagaagcaatcacccaactatatggaccggggtcaagaagggatttcctcttttttaccggtaatccgaatggcgttgcccctggtactgtcgtgagtggtaccactggttctacagacgcgaatatcgtacctcagggcagc

SEQ ID NO: 2228 - protein, 63 aa, Tolypothrix campylonemoides
MKKTYNAPKLTNHGSVEAITQLYGPGSRRDFLFFTGNPNGVAPGTVVSGTTGSTDANIVPQGS

SEQ ID NO: 2229 - DNA, 162 bp, Psychromonas ingrahamii
  CDS (1)..(162)
atgtcagataagatagaaaaaacagtgagtaattctaaaaataatactttggtagaaaataaagctgaatggcaagtgcctagcctaagcaagttagatgtaagtcagacccaaggaggaagcgttagcagtgatgaacttgcttcttctaaagtcggttcg

SEQ ID NO: 2230 - protein, 54 aa, Psychromonas ingrahamii
MSDKIEKTVSNSKNNTLVENKAEWQVPSLSKLDVSQTQGGSVSSDELASSKVGS

SEQ ID NO: 2231 - DNA, 150 bp, Mesorhizobium sp.
  CDS (1)..(150)
atggaacagaatgttgaaaagcatgaatacgagacaccaagcctgacggttcatggttcgattgagaccatcacccagggtggcggcggcaacacggcgatcgacgcatcgttccccgcgcacacgccgatcggcgacctgacgttctcc

SEQ ID NO: 2232 - protein, 50 aa, Mesorhizobium sp.
MEQNVEKHEYETPSLTVHGSIETITQGGGGNTAIDASFPAHTPIGDLTFS

SEQ ID NO: 2233 - DNA, 153 bp, Desulfocapsa sulfexigens; identical to SEQ ID NO: 2211
  CDS (1)..(153)

SEQ ID NO: 2234 - protein, 51 aa, Desulfocapsa sulfexigens; identical to SEQ ID NO: 2212

SEQ ID NO: 2235 - DNA, 150 bp, Mesorhizobium sp.; identical to SEQ ID NO: 2231
  CDS (1)..(150)

SEQ ID NO: 2236 - protein, 50 aa, Mesorhizobium sp.; identical to SEQ ID NO: 2232

SEQ ID NO: 2237 - DNA, 156 bp, Desulfobulbus japonicus
  CDS (1)..(156)
atggaaaccagagagaaagttacaaataatactgaaaagaagcagtgggcacagcctgagctgacccattatggcagcgttgaaaaaattaccctcaaaggttggggcgcacaggatggtcagggccttgagcctgccgggcatcatcctagtctg

SEQ ID NO: 2238 - protein, 52 aa, Desulfobulbus japonicus
METREKVTNNTEKKQWAQPELTHYGSVEKITLKGWGAQDGQGLEPAGHHPSL

SEQ ID NO: 2239 - DNA, 138 bp, Sphingomonas sp.
  CDS (1)..(138)
atgcccaaagctcaatatgaagcgcctgaactgatcgatgctggcctgttcgaggagatcaccgagggcggtgcaaacggctccgtcctcgacgcatccttctcggccggcacgccggtttccgatctgaccttttcc

SEQ ID NO: 2240 - protein, 46 aa, Sphingomonas sp.
MPKAQYEAPELIDAGLFEEITEGGANGSVLDASFSAGTPVSDLTFS

SEQ ID NO: 2241 - DNA, 144 bp, Salinibacter ruber
  CDS (1)..(144)
atggattaccaaactcccgagcttacaccgcatggatcggtgactgaacttaccgccactatcaatccttccaacattgatgatgtgaacgaggaaactggcgacgaaggccagggttcgttcagcgtcgttaaggaagaaggc

SEQ ID NO: 2242 - protein, 48 aa, Salinibacter ruber
MDYQTPELTPHGSVTELTATINPSNIDDVNEETGDEGQGSFSVVKEEG

SEQ ID NO: 2243 - DNA, 102 bp, Salinibacter ruber
  CDS (1)..(102)
atgccaacgctgacaatgaccactcgaattggctcccagatcagtcaaacggtgggaacggaaaaggcaccggagatggaagctaggggaagccgtagaccg

SEQ ID NO: 2244 - protein, 34 aa, Salinibacter ruber
MPTLTMTTRIGSQISQTVGTEKAPEMEARGSRRP

SEQ ID NO: 2245 - DNA, 150 bp, Mesorhizobium sp.
  CDS (1)..(150)
atggaacagaatgttgaaaagcacgagtacgaaacgccaagcctgacggtacatggttccattgaaaccatcacccagggcggtggtggcagcacggcaaccgacgcgtcgtttcccgcgcacaccccaatcggcgacctgacgttctcc

SEQ ID NO: 2246 - protein, 50 aa, Mesorhizobium sp.
MEQNVEKHEYETPSLTVHGSIETITQGGGGSTATDASFPAHTPIGDLTFS

SEQ ID NO: 2247 - DNA, 135 bp, Desulfobulbaceae bacterium
  CDS (1)..(135)
atggaaaagaaagagtatgtggcaccggttgttgtagtctatggcgatgtagaagagataacaaaagcttcctcacctactccgactcgtcttgatgcaaattataatcaaggtgcgagtggcaacatttttagt

SEQ ID NO: 2248 - protein, 45 aa, Desulfobulbaceae bacterium
MEKKEYVAPVVVVYGDVEEITKASSPTPTRLDANYNQGASGNIFS

SEQ ID NO: 2249 - DNA, 123 bp, Prevotella oryzae
  CDS (1)..(123)
atggaaaaaggaaaaaaaagacaagaaaagtggagtacgccaaaagtggaaattatctctattaaagaacagaccttaggtgctatcggcacaaattgggatcagcaggacaatactctaagt

SEQ ID NO: 2250 - protein, 41 aa, Prevotella oryzae
MEKGKKRQEKWSTPKVEIISIKEQTLGAIGTNWDQQDNTLS

SEQ ID NO: 2251 - DNA, 144 bp, Methanobacterium formicicum
  CDS (1)..(144)
atgacagataatgagaataacaaaagaaaatcatatgaaactccaaaaatcaaagtccatggaaacatcaaaaaactaactaaaggtagtgatggtgatgaagctgatggaactgcaggtggaactttatatacttaccaaggt

SEQ ID NO: 2252 - protein, 48 aa, Methanobacterium formicicum
MTDNENNKRKSYETPKIKVHGNIKKLTKGSDGDEADGTAGGTLYTYQG

SEQ ID NO: 2253 - DNA, 147 bp, Runella slithyformis
  CDS (1)..(147)
atgaaactaaatcccaaaaatgacaaaagtaacaggctgcgccggcgctatcatgcccctcagctgaaaaagtatggtccagttgcaaatattactcgtgcagattcaggaaccaacctcgatagtttagggggggacatatctgcc

SEQ ID NO: 2254 - protein, 49 aa, Runella slithyformis
MKLNPKNDKSNRLRRRYHAPQLKKYGPVANITRADSGTNLDSLGGDISA

SEQ ID NO: 2255 - DNA, 144 bp, Salinibacter ruber; identical to SEQ ID NO: 2241
  CDS (1)..(144)

SEQ ID NO: 2256 - protein, 48 aa, Salinibacter ruber; identical to SEQ ID NO: 2242

SEQ ID NO: 2257 - DNA, 102 bp, Salinibacter ruber; identical to SEQ ID NO: 2243
  CDS (1)..(102)

SEQ ID NO: 2258 - protein, 34 aa, Salinibacter ruber; identical to SEQ ID NO: 2244

SEQ ID NO: 2259 - DNA, 168 bp, Nostoc sp.
  CDS (1)..(168)
atgagtgaatctcatgaagagaatcaacctgagaaggaagataatcgtctcccttatgaaaagcctaaattacgcaagcacggcaaagtcaatgatactactttgtcagttcctacaccaggcaccaagttcgatactccttttgttggaattcctagagctatatct

SEQ ID NO: 2260 - protein, 56 aa, Nostoc sp.
MSESHEENQPEKEDNRLPYEKPKLRKHGKVNDTTLSVPTPGTKFDTPFVGIPRAIS

SEQ ID NO: 2261 - DNA, 168 bp, Nostoc sp.; identical to SEQ ID NO: 2259
  CDS (1)..(168)

SEQ ID NO: 2262 - protein, 56 aa, Nostoc sp.; identical to SEQ ID NO: 2260

SEQ ID NO: 2263 - DNA, 189 bp, Verrucomicrobia bacterium
  CDS (1)..(189)
atgaagaacgatagggaaaagcgggaactcaatcaggcggtccggcgagcgaatcggagtcggaagccctacgaggcgccaaagctgattgttcatgggtcggtcgaagagctcacgaaggctagcggcctcttgctcaccgatacgcttctgacaggaagcacggtcacgaccgtcaccgtcctcggc

SEQ ID NO: 2264 - protein, 63 aa, Verrucomicrobia bacterium
MKNDREKRELNQAVRRANRSRKPYEAPKLIVHGSVEELTKASGLLLTDTLLTGSTVTTVTVLG

SEQ ID NO: 2265 - DNA, 117 bp, Streptomyces graminilatus
  CDS (1)..(117)
atgaacgacgtctacgagccgcccacgctggtggagatcggtggcttcgcggagctgaccatggccttcgggccgtgccaggagcaggactggttcgacggtaccgcctggatctgc

SEQ ID NO: 2266 - protein, 39 aa, Streptomyces graminilatus
MNDVYEPPTLVEIGGFAELTMAFGPCQEQDWFDGTAWIC

SEQ ID NO: 2267 - DNA, 123 bp, Streptomyces flocculus; identical to SEQ ID NO: 505
  CDS (1)..(123)

SEQ ID NO: 2268 - protein, 41 aa, Streptomyces flocculus; identical to SEQ ID NO: 506

SEQ ID NO: 2269 - DNA, 150 bp, Rhodospirillum rubrum
  CDS (1)..(150)
atgaacgagcaaaagacttccgatcccgtcgagctggaagacgaaaccaagcttcccgtttggcaccggccgaccttcgccatcctcgacgtggaatcgggcacggtcacgacgtcggggcctcacgccgacggcaatggctcgacaagc

SEQ ID NO: 2270 - protein, 50 aa, Rhodospirillum rubrum
MNEQKTSDPVELEDETKLPVWHRPTFAILDVESGTVTTSGPHADGNGSTS

SEQ ID NO: 2271 - DNA, 147 bp, Betaproteobacteria bacterium
  CDS (1)..(147)
atggacggaatcccggctgcacgcgatcgcccgccctaccaaccgccgaggctggtgcgctacggtgatgcgacggcaattacgaaggctgtgtcagatacctccacaaagcccgacgggggtggcggaaagacgaacaaaacgtca

SEQ ID NO: 2272 - protein, 49 aa, Betaproteobacteria bacterium
MDGIPAARDRPPYQPPRLVRYGDATAITKAVSDTSTKPDGGGGKTNKTS

SEQ ID NO: 2273 - DNA, 138 bp, Erythrobacter atlanticus
  CDS (1)..(138)
atgactaccaagacaagtattaatacgggcaaggctcgctattctacgccgcagctgaaggaatttggctcggttcgcaaccttaccggcggtagtggcggcacaaggggcgatggccaactcggccagacgagactc

SEQ ID NO: 2274 - protein, 46 aa, Erythrobacter atlanticus
MTTKTSINTGKARYSTPQLKEFGSVRNLTGGSGGTRGDGQLGQTRL

SEQ ID NO: 2275 - DNA, 183 bp, Unknown
  Description of Unknown: Uncultured marine bacterium sequence
  CDS (1)..(183)
atgtcgggagagcagtcagtgagcagaagagaggaaaatccccagatatcgatttcagcggggtctggccgtaaatacaagacgccgcgattggagcggtttggtgagatctctcatgtcacacagggctcatttggtaagaaaaaagacgccgaaggcgacgaagtggcaattattccaaaa

SEQ ID NO: 2276 - protein, 61 aa, Unknown
  Description of Unknown: Uncultured marine bacterium sequence
MSGEQSVSRREENPQISISAGSGRKYKTPRLERFGEISHVTQGSFGKKKDAEGDEVAIIPK

SEQ ID NO: 2277 - DNA, 183 bp, Unknown; identical to SEQ ID NO: 2275
  Description of Unknown: Uncultured marine bacterium sequence
  CDS (1)..(183)

SEQ ID NO: 2278 - protein, 61 aa, Unknown; identical to SEQ ID NO: 2276
  Description of Unknown: Uncultured marine bacterium sequence

SEQ ID NO: 2279 - DNA, 138 bp, Gloeobacter kilaueensis
  CDS (1)..(138)
atgagcgagccagcgccgccggagaaaaaaccgtaccagcctccccagttgcacgtctacggcgatatccgcacgatcacccagggaacttctgatcgcaagggccgaaaagacagcaacagagtaaagacagctgtc

SEQ ID NO: 2280 - protein, 46 aa, Gloeobacter kilaueensis
MSEPAPPEKKPYQPPQLHVYGDIRTITQGTSDRKGRKDSNRVKTAV

SEQ ID NO: 2281 - DNA, 138 bp, Sphingomonas sp.
  CDS (1)..(138)
atgcccaaagccgactatgaaacccctgagctcactgaagtgggttcgttcgaggcggtgactcaggggggtgccgacggcactgttctggacgctgcattttcctctggaacgcccgtctcggatctgactttttcc

SEQ ID NO: 2282 - protein, 46 aa, Sphingomonas sp.
MPKADYETPELTEVGSFEAVTQGGADGTVLDAAFSSGTPVSDLTFS

SEQ ID NO: 2283 - DNA, 138 bp, Gloeobacter kilaueensis; identical to SEQ ID NO: 2279
  CDS (1)..(138)

SEQ ID NO: 2284 - protein, 46 aa, Gloeobacter kilaueensis; identical to SEQ ID NO: 2280

SEQ ID NO: 2285 - DNA, 141 bp, Filamentous cyanobacterium
  CDS (1)..(141)
atgaacaatcccacaaccaaaaaaccttatcaacccccccaactcaaagtttacggcgacatcaagaccattaccgccgccgtagctgttgaaggtaacgttgatggtgcggggcccgacgctgttcccaaccgcaccaac

SEQ ID NO: 2286 - protein, 47 aa, Filamentous cyanobacterium
MNNPTTKKPYQPPQLKVYGDIKTITAAVAVEGNVDGAGPDAVPNRTN

SEQ ID NO: 2287 - DNA, 144 bp, Asticcacaulis sp.
  CDS (1)..(144)
atgaccgaacaaactaaagttgcttacgtcgctccgaccgtcgaaaagatcggcgatttcgaaaccaccacccagcacacgaactccggcaccactgccgatatcgctctgggtcaaggcgacagcatcctgggtcacctgtcc

SEQ ID NO: 2288 - protein, 48 aa, Asticcacaulis sp.
MTEQTKVAYVAPTVEKIGDFETTTQHTNSGTTADIALGQGDSILGHLS

SEQ ID NO: 2289 - DNA, 129 bp, Gracilibacillus boraciitolerans; identical to SEQ ID NO: 2157
  CDS (1)..(129)

SEQ ID NO: 2290 - protein, 43 aa, Gracilibacillus boraciitolerans; identical to SEQ ID NO: 2158

SEQ ID NO: 2291 - DNA, 156 bp, Leptolyngbya sp.
  CDS (1)..(156)
atgtctcaaacgactcctaataagacaccaaaatcaggcaagcgtctataccattctcctaaattcgataaattaggtaaagtgagtgagcttacactgactagcacaacatttgtgggttcagacggtggcagtggaattttccaatatgcttca

SEQ ID NO: 2292 - protein, 52 aa, Leptolyngbya sp.
MSQTTPNKTPKSGKRLYHSPKFDKLGKVSELTLTSTTFVGSDGGSGIFQYAS

SEQ ID NO: 2293 - DNA, 150 bp, Pedobacter arcticus
  CDS (1)..(150)
atgaacaaagaagaaactactggaaactctaaaaaaaactacgctgcaccagaactgaaggaattggggaaaattggagaaattacgaataccacaagtgcagacagcactcatactcaagatggtggtggtggcccaaattactattca

SEQ ID NO: 2294 - protein, 50 aa, Pedobacter arcticus
MNKEETTGNSKKNYAAPELKELGKIGEITNTTSADSTHTQDGGGGPNYYS

SEQ ID NO: 2295 - DNA, 159 bp, Spirulina subsalsa
  CDS (1)..(159)
atgacaaaccacgccactgaaactgaactcaagccaaaacagccctattatgctcctcaagtccaatgttacggggacattaaaactctgacccaaagtgtagcgattcgcgggaatttagatggtgcagggcctcgggctgttcctaaccgaactatt

SEQ ID NO: 2296 - protein, 53 aa, Spirulina subsalsa
MTNHATETELKPKQPYYAPQVQCYGDIKTLTQSVAIRGNLDGAGPRAVPNRTI

SEQ ID NO: 2297 - DNA, 132 bp, Edaphobacter aggregans
  CDS (1)..(132)
atgcgctatatccaaccgaaaatcacaggcaggttcaacgccacgtccaccatcaagagtgcgaagatcgcaccccaatctgaagtcggcagcagcctcctgacgaacggtgctgcctatcaggcagacgag

SEQ ID NO: 2298 - protein, 44 aa, Edaphobacter aggregans
MRYIQPKITGRFNATSTIKSAKIAPQSEVGSSLLTNGAAYQADE

SEQ ID NO: 2299 - DNA, 129 bp, Sphingomonas sp.
  CDS (1)..(129)
atggtgctggcgctgcgcccctggacgacgccccggatcgtgtatcaggcgcaagccgccgaagacacgctggccgacaccgcacagccgccgaacgacttgtcgggatcgcccgctttcctcgcgtcg

SEQ ID NO: 2300 - protein, 43 aa, Sphingomonas sp.
MVLALRPWTTPRIVYQAQAAEDTLADTAQPPNDLSGSPAFLAS

SEQ ID NO: 2301 - DNA, 126 bp, Erythrobacter longus
  CDS (1)..(126)
atgattaagacttttgaaaaagcgaagtatgaggctccgaagctgaccgtatttggttcggttcgtaacctcaccggcggaagccagacccgtttccgtgatggtgcggcgtctaactcacgcttc

SEQ ID NO: 2302 - protein, 42 aa, Erythrobacter longus
MIKTFEKAKYEAPKLTVFGSVRNLTGGSQTRFRDGAASNSRF

SEQ ID NO: 2303 - DNA, 165 bp, Verrucomicrobium sp.
  CDS (1)..(165)
atgacacaaagagatgaccagcataatgctacaggtagctactcccccgtttccaaacaggcctacgagacgccgaagctgaccccgtccggccgaatggccgaggtcacgcaaaaatcagaccgtgtcccggatggaaagagtgggctgcgcggtaatcactca

SEQ ID NO: 2304 - protein, 55 aa, Verrucomicrobium sp.
MTQRDDQHNATGSYSPVSKQAYETPKLTPSGRMAEVTQKSDRVPDGKSGLRGNHS

SEQ ID NO: 2305 - DNA, 171 bp, Marinomonas mediterranea
  CDS (1)..(171)
atgagcgatattgatgttaatacactgttaagtgaagataaaaactcgaaaaaaagtttgggagataagctcatttgggttgctccggtcttagaagagcttgagactgataaaacgagatctgggggcggtacagctactgaaactccgtttaatcccggagtgtcaagc

SEQ ID NO: 2306 - protein, 57 aa, Marinomonas mediterranea
MSDIDVNTLLSEDKNSKKSLGDKLIWVAPVLEELETDKTRSGGGTATETPFNPGVSS

SEQ ID NO: 2307 - DNA, 177 bp, Chloracidobacterium thermophilum
  CDS (1)..(177)
atgaaacagccattaccctcaattgaacaacaagcttctttatcgcaagtcaagcagcccggcaaaaagacgtaccactcgccaacctttacaggttacggctcactcactgactttacccgagcttcaggcaacggtgggactcctgacagcatcttaatgcgtaatgcctcaagg

SEQ ID NO: 2308 - protein, 59 aa, Chloracidobacterium thermophilum
MKQPLPSIEQQASLSQVKQPGKKTYHSPTFTGYGSLTDFTRASGNGGTPDSILMRNASR

SEQ ID NO: 2309 - DNA, 111 bp, Sanguibacter sp.
  CDS (1)..(111)
atggagaaggcataccaggcaccgagcatcgtcgccgcaggcgacttcacagagctcacgcaggccgtgcgagacggcggggtcgtcgacttcgtcggcggatggtggttc

SEQ ID NO: 2310 - protein, 37 aa, Sanguibacter sp.
MEKAYQAPSIVAAGDFTELTQAVRDGGVVDFVGGWWF

SEQ ID NO: 2311 - DNA, 102 bp, Streptomyces sp.
  CDS (1)..(102)
atggtggaggtcggtgacttcgccgatctgacgcgcggcgaggccatcggggcgcagtacgagggtggattccctccctatgagtggtacttgggccccagc

SEQ ID NO: 2312 - protein, 34 aa, Streptomyces sp.
MVEVGDFADLTRGEAIGAQYEGGFPPYEWYLGPS

SEQ ID NO: 2313 - DNA, 102 bp, Streptomyces kanamyceticus
  CDS (1)..(102)
atggtggaggtcggcgacttcgccgagctgacgcgcggtgagccgctgggggcgttctacgaaggcgggttcccgccctacgagtggtacctcggccccagc

SEQ ID NO: 2314 - protein, 34 aa, Streptomyces kanamyceticus
MVEVGDFAELTRGEPLGAFYEGGFPPYEWYLGPS

SEQ ID NO: 2315 - DNA, 102 bp, Streptomyces phaeochromogenes
  CDS (1)..(102)
atggtggaagtcggtgacttcgccgagctgacccgcggcgaggccctgggcgcgcactacgagggcggattcccgccctatgagtggtacctcggccccaac

SEQ ID NO: 2316 - protein, 34 aa, Streptomyces phaeochromogenes
MVEVGDFAELTRGEALGAHYEGGFPPYEWYLGPN

SEQ ID NO: 2317 - DNA, 105 bp, Streptomyces alboniger
  CDS (1)..(105)
atgacgtacgagcgtcccactctcaccaaggccggaagcttccgtaaggtgaccgggatcaaggaccacgggcccaaggacgtcctcggcggcaagcagctcctc

SEQ ID NO: 2318 - protein, 35 aa, Streptomyces alboniger
MTYERPTLTKAGSFRKVTGIKDHGPKDVLGGKQLL

SEQ ID NO: 2319 - DNA, 204 bp, Streptomyces sp.
  CDS (1)..(204)
atggcggacctccaagcggctcgatccgtggcccccggctccggcgagccggtgcagaagccggtgcacgagccgacgccgacgcgcgagccggtctacgagcctccggcgctggtcgaggtcgggagcttctccgccctgacactcggctggttcgaaggaaacgtcctcgaggagggcggcgaagggctgcggtggtggagg

SEQ ID NO: 2320 - protein, 68 aa, Streptomyces sp.
MADLQAARSVAPGSGEPVQKPVHEPTPTREPVYEPPALVEVGSFSALTLGWFEGNVLEEGGEGLRWWR

SEQ ID NO: 2321 - DNA, 150 bp, Streptomyces aurantiacus
  CDS (1)..(150)
atggaggtgatcaccgtgcaggagacgctgcagggctttgagaccacggatgtgtacgagccgccgctgctggcggaggtcgggcagtacgccgagctgacccagggcgagttcggggactggcccgactacccggtcggcctctggctc

SEQ ID NO: 2322 - protein, 50 aa, Streptomyces aurantiacus
MEVITVQETLQGFETTDVYEPPLLAEVGQYAELTQGEFGDWPDYPVGLWL

SEQ ID NO: 2323 - DNA, 123 bp, Streptomyces luridiscabiei; identical to SEQ ID NO: 303
  CDS (1)..(123)

SEQ ID NO: 2324 - protein, 41 aa, Streptomyces luridiscabiei; identical to SEQ ID NO: 304

SEQ ID NO: 2325 - DNA, 108 bp, Streptomyces atriruber
  CDS (1)..(108)
atgaagaaggcctacgaagcgccggcgctcgtccggctcgggacattccggaagaagaccgggctgctgcagcggtccggaaacgaccggctcatcctgagtaagaac

SEQ ID NO: 2326 - protein, 36 aa, Streptomyces atriruber
MKKAYEAPALVRLGTFRKKTGLLQRSGNDRLILSKN

SEQ ID NO: 2327 - DNA, 108 bp, Streptomyces sp.
  CDS (1)..(108)
atgaagaaggcatacgaggctccgacgctcgtccgactcggcagcttccggaaggagaccgggctcctgggacgctccggcaacgaccggctgatcctgagcaagaac

SEQ ID NO: 2328 - protein, 36 aa, Streptomyces sp.
MKKAYEAPTLVRLGSFRKETGLLGRSGNDRLILSKN

SEQ ID NO: 2329 - DNA, 108 bp, Streptomyces torulosus
  CDS (1)..(108)
atgaagaaggcttacgaggcaccgacgctcgtccgactcggcacgttccggaaggagacggggctcctggggcgctccggcaacgaccggctgatcctgagcaagaac

SEQ ID NO: 2330 - protein, 36 aa, Streptomyces torulosus
MKKAYEAPTLVRLGTFRKETGLLGRSGNDRLILSKN

SEQ ID NO: 2331 - DNA, 108 bp, Streptomyces alboniger
  CDS (1)..(108)
atgaagaaggcctacgaagcgccggcgctcatccgactcgggacgttccggaagaagaccgggctgctggcgcggaacggaaacgaccgactcattttcagcaagaac

SEQ ID NO: 2332 - protein, 36 aa, Streptomyces alboniger
MKKAYEAPALIRLGTFRKKTGLLARNGNDRLIFSKN

SEQ ID NO: 2333 - DNA, 120 bp, Lactococcus garvieae; identical to SEQ ID NO: 1549
  CDS (1)..(120)

SEQ ID NO: 2334 - protein, 40 aa, Lactococcus garvieae; identical to SEQ ID NO: 1550

SEQ ID NO: 2335 - DNA, 126 bp, Lactococcus garvieae; identical to SEQ ID NO: 1551
  CDS (1)..(126)

SEQ ID NO: 2336 - protein, 42 aa, Lactococcus garvieae; identical to SEQ ID NO: 1552

SEQ ID NO: 2337 - DNA, 177 bp, Streptomyces aureus
  CDS (1)..(177)
atgaactctgcacaccagcaccgcgaccccgcacacgagaacgcccccgccggcgcggcggacgggcgcgaccccgaactgctcctcgtcgacgccggatcggtgcgtgacgtcaccctggggaactggtcgcacggccaccccgacgacacgcagcactggacaccgatcgacgac

SEQ ID NO: 2338 - protein, 59 aa, Streptomyces aureus
MNSAHQHRDPAHENAPAGAADGRDPELLLVDAGSVRDVTLGNWSHGHPDDTQHWTPIDD

SEQ ID NO: 2339 - DNA, 111 bp, Streptomyces rimosus
  CDS (1)..(111)
atgcgtctgcgttacacgcctccgaaggtcgtccgtatcggacgggtcgagaagctgaccggtcagctgcgccacggcactcctgacctgctcggccacggaaacatctgg

SEQ ID NO: 2340 - protein, 37 aa, Streptomyces rimosus
MRLRYTPPKVVRIGRVEKLTGQLRHGTPDLLGHGNIW

SEQ ID NO: 2341 - DNA, 156 bp, Frankia saprophytica
  CDS (1)..(156)
atgactaccgttgagcacgtgcccgctgtggcgccagctgagcaccggccctacgagaagcccgcgctggtctgccacggcagcctggcgatgcggaccgccggtgggcttggcctcaactttgacggggcgctgcccctcgatttcaccagcggc

SEQ ID NO: 2342 - protein, 52 aa, Frankia saprophytica
MTTVEHVPAVAPAEHRPYEKPALVCHGSLAMRTAGGLGLNFDGALPLDFTSG

SEQ ID NO: 2343 - DNA, 165 bp, Mastigocoleus testarum
  CDS (1)..(165)
atgaagaaacagtacaaaaagccaacattatctacccacggaaatgtcgaatcaattactcaagtattaggtaatgataagattgaagattttctcatttttaacggtactgttgtaggcactagtgatgattcaattgactttgactctgataagcataagcct

SEQ ID NO: 2344 - protein, 55 aa, Mastigocoleus testarum
MKKQYKKPTLSTHGNVESITQVLGNDKIEDFLIFNGTVVGTSDDSIDFDSDKHKP

SEQ ID NO: 2345 - DNA, 141 bp, Clostridium butyricum
ttgaaaaaatggattgaaccagaaattcaaaatttagcattaaaggatacaaagggtggtccaaagtatgatcctaaagtagatggtgatgctatatatgacgaaaactcaaataagtggtggcaagctataggaaaatct

SEQ ID NO: 2346 - protein, 47 aa, Clostridium butyricum
MKKWIEPEIQNLALKDTKGGPKYDPKVDGDAIYDENSNKWWQAIGKS

SEQ ID NO: 2347 - DNA, 180 bp, Lamprocystis purpurea
  CDS (1)..(180)
atgaccagcgatcctgaaaccccggccgagcaacgtccgctccgcgcagatcgccccgaggccgctcgtctaccctacgacccggcgcgtcttgtccatctgggctcattcagagaactgaccaaggggggtggactgactggtgacgacattggcgcacccttcgggacccggcccgga

SEQ ID NO: 2348 - protein, 60 aa, Lamprocystis purpurea
MTSDPETPAEQRPLRADRPEAARLPYDPARLVHLGSFRELTKGGGLTGDDIGAPFGTRPG

SEQ ID NO: 2349 - DNA, 150 bp, Salinarimonas rosea
  CDS (1)..(150)
atgaaccagcacgacgagaagctcgcgtacgtggctccggagctcgaggttctcggcacgctcgaggatctgacccacggtaccacgtcgggcacggtcaccgacgccgacttctccgcggggacgccgatccccgatctcaccttctcg

SEQ ID NO: 2350 - protein, 50 aa, Salinarimonas rosea
MNQHDEKLAYVAPELEVLGTLEDLTHGTTSGTVTDADFSAGTPIPDLTFS

SEQ ID NO: 2351 - DNA, 108 bp, Brevundimonas nasdae
  CDS (1)..(108)
atgacgtcgctgggttcgttcgaaaccctgacgcaaggcgcctcgcgcggttcgcagctcgacgcgaccttcccgaccggcaccccgttcggcgagctgaccttctcc

SEQ ID NO: 2352 - protein, 36 aa, Brevundimonas nasdae
MTSLGSFETLTQGASRGSQLDATFPTGTPFGELTFS

SEQ ID NO: 2353 - DNA, 108 bp, Streptomyces viridochromogenes
  CDS (1)..(108)
atgctgaggtacgcgaccccgactgtggtccgactaggacggatcgaggaactcaccgggcagctgcgccgcggcgttcccgacctcctcggtcacggcaacatcctg

SEQ ID NO: 2354 - protein, 36 aa, Streptomyces viridochromogenes
MLRYATPTVVRLGRIEELTGQLRRGVPDLLGHGNIL

SEQ ID NO: 2355 - DNA, 174 bp, Sulfurovum sp.
  CDS (1)..(174)
atgaaaaaaaactttagtataaaaaaatataataaaccggaaataaaaaatttagggaaaattggaactaaaacccaatataataaatcgacagcaggtgccgatggtacaagtagcacacattataataaggggcaagataccgggtttggtggtgctggtacagttactcct

SEQ ID NO: 2356 - protein, 58 aa, Sulfurovum sp.
MKKNFSIKKYNKPEIKNLGKIGTKTQYNKSTAGADGTSSTHYNKGQDTGFGGAGTVTP

SEQ ID NO: 2357 - DNA, 138 bp, Sphingomonas sp.
  CDS (1)..(138)
atgcccaaaactgaatatgagacacccgaactgatcgacgcgggcctgttcgaggagatcaccgaaggcggagcaagcggctcggtcctcgatgccaccttctctgcaggaaccccggtctccgacctgaccttttcc

SEQ ID NO: 2358 - protein, 46 aa, Sphingomonas sp.
MPKTEYETPELIDAGLFEEITEGGASGSVLDATFSAGTPVSDLTFS

SEQ ID NO: 2359 - DNA, 135 bp, Leadbetterella byssophila
  CDS (1)..(135)
atggaacctgtagtaaaaaagaggtacacgaaacctgtattattgaagcatggaatgcttaggaaattgactctaaaatcgggaagtgcagtagatttcactgagccatctagttctgattggggaggggaagat

SEQ ID NO: 2360 - protein, 45 aa, Leadbetterella byssophila
MEPVVKKRYTKPVLLKHGMLRKLTLKSGSAVDFTEPSSSDWGGED

SEQ ID NO: 2361 - DNA, 81 bp, Rhodobacter sphaeroides; identical to SEQ ID NO: 881
  CDS (1)..(81)

SEQ ID NO: 2362 - protein, 27 aa, Rhodobacter sphaeroides
MTHGATDGWALDASFPVDTPKGDLTFS

SEQ ID NO: 2363 - DNA, 126 bp, Streptococcus pneumoniae; identical to SEQ ID NO: 1563
  CDS (1)..(126)

SEQ ID NO: 2364 - protein, 42 aa, Streptococcus pneumoniae; identical to SEQ ID NO: 1564

SEQ ID NO: 2365 - DNA, 81 bp, Rhodobacter sphaeroides; identical to SEQ ID NO: 881
  CDS (1)..(81)

SEQ ID NO: 2366 - protein, 27 aa, Rhodobacter sphaeroides
MTHGATDGWALDASFPVDTPKGDLTFS

SEQ ID NO: 2367 - DNA, 108 bp, Alistipes sp.
  CDS (1)..(108)
atgaacgaaaaagaaaaatggagttcacctgaagttgaggttatctctattagttcagagactttaggaacgggaactaataatcaagaagctgatagctccaattcc

SEQ ID NO: 2368 - protein, 36 aa, Alistipes sp.
MNEKEKWSSPEVEVISISSETLGTGTNNQEADSSNS

SEQ ID NO: 2369 - DNA, 126 bp, Paenibacillus polymyxa
  CDS (1)..(126)
atgagtaaaaaagaatggcaggaaccgacgattgaggtgctggatattaaccacactatggcgggtaaaggctggaaacagattgattgggtgtcagaccatgatgccgatctgtataatccgagc

SEQ ID NO: 2370 - protein, 42 aa, Paenibacillus polymyxa
MSKKEWQEPTIEVLDINHTMAGKGWKQIDWVSDHDADLYNPS

SEQ ID NO: 2371 - DNA, 138 bp, Streptomyces megasporus; identical to SEQ ID NO: 839
  CDS (1)..(138)

SEQ ID NO: 2372 - protein, 46 aa, Streptomyces megasporus; identical to SEQ ID NO: 840

SEQ ID NO: 2373 - DNA, 168 bp, Rhodobacter sphaeroides
  CDS (1)..(168)
atgctgaggatatttgacgtggcaaacaacatccaaactcttgcttatcaggccccggtgctgcgcgctcacggcacgctggaagccatgacccacggtgcaagcacggggcatgtgaccgatgcggccttcccgtcgggcactgcgatcgccgacatgaccttctcc

SEQ ID NO: 2374 - protein, 56 aa, Rhodobacter sphaeroides
MLRIFDVANNIQTLAYQAPVLRAHGTLEAMTHGASTGHVTDAAFPSGTAIADMTFS

SEQ ID NO: 2375 - DNA, 150 bp, Mesorhizobium sp.; identical to SEQ ID NO: 2231
  CDS (1)..(150)

SEQ ID NO: 2376 - protein, 50 aa, Mesorhizobium sp.; identical to SEQ ID NO: 2232

SEQ ID NO: 2377 - DNA, 126 bp, Sphingopyxis sp.
  CDS (1)..(126)
atgaaccacgaacagaatgatggtctcatcgatctcggcgccgtcaccgaggaaaccaaggggcccggcccgcagggcttcgataccctcggtccgcagcaattgcgcggcggcatttccgacgag

SEQ ID NO: 2378 - protein, 42 aa, Sphingopyxis sp.
MNHEQNDGLIDLGAVTEETKGPGPQGFDTLGPQQLRGGISDE

SEQ ID NO: 2379 - DNA, 126 bp, Sphingopyxis sp.; identical to SEQ ID NO: 2377
  CDS (1)..(126)

SEQ ID NO: 2380 - protein, 42 aa, Sphingopyxis sp.; identical to SEQ ID NO: 2378

SEQ ID NO: 2381 - DNA, 111 bp, Klebsiella variicola; identical to SEQ ID NO: 833
  CDS (1)..(111)

SEQ ID NO: 2382 - protein, 37 aa, Klebsiella variicola; identical to SEQ ID NO: 834

SEQ ID NO: 2383 - DNA, 144 bp, Bradyrhizobium sp.
  CDS (1)..(144)
atgaatacaaccgctatcaatgacacccttatcaaggacacggtgcaggacctcggggacgctaccgagctcacaaaaggctttgggggctctaggcgcgcagaacacaccacgggcgattattattacatggatgattccgat

SEQ ID NO: 2384 - protein, 48 aa, Bradyrhizobium sp.
MNTTAINDTLIKDTVQDLGDATELTKGFGGSRRAEHTTGDYYYMDDSD

SEQ ID NO: 2385 - DNA, 135 bp, Bacillus circulans
  CDS (1)..(135)
atgaacaagcttgaatggaaagagccaaacttagaagttttagatgtaaaagaaacaatggcaggaccatttaataacaataagttagatgcaacttatgaaactggaacgccattccctgatcttggctggagc

SEQ ID NO: 2386 - protein, 45 aa, Bacillus circulans
MNKLEWKEPNLEVLDVKETMAGPFNNNKLDATYETGTPFPDLGWS

SEQ ID NO: 2387 - DNA, 261 bp, Streptomyces sp.
gtggccccggctgcgcgcggggctccggatcgcagcgcttctggacgcccgctgaccacacgcagccccggagccgaacgattggtcccggtggcaagccatccatcacccaacagaaggaagctcgtcgtgaacacacctcaggacgccaaggacaccgacgagaacgaactgctccctgtcgacaccggtgatgccaccgtgctcaccgaaggtcagggcggcggccacagcgaggacaagcgtcgcgcctacaacagc

SEQ ID NO: 2388 - protein, 87 aa, Streptomyces sp.
MAPAARGAPDRSASGRPLTTRSPGAERLVPVASHPSPNRRKLVVNTPQDAKDTDENELLPVDTGDATVLTEGQGGGHSEDKRRAYNS

SEQ ID NO: 2389 - DNA, 129 bp, Amycolatopsis sp.
  CDS (1)..(129)
atgacggagccacccacggatgaggcgggctacgagccgcctttgctcttcgacctcgggcacgtgcgggagctgaccctgggcagctcctccagcggcagtgccgactccaattcacagtattactgg

SEQ ID NO: 2390 - protein, 43 aa, Amycolatopsis sp.
MTEPPTDEAGYEPPLLFDLGHVRELTLGSSSSGSADSNSQYYW

SEQ ID NO: 2391 - DNA, 90 bp, Streptomyces xiamenensis
  CDS (1)..(90)
atggtcgttgacctcggcgacctggtcgccctgaccctcggccagggcaagggcagcagcgaggacaagcgtcgcgcctacaaccaccac

SEQ ID NO: 2392 - protein, 30 aa, Streptomyces xiamenensis
MVVDLGDLVALTLGQGKGSSEDKRRAYNHH

SEQ ID NO: 2393 - DNA, 141 bp, Haloglycomyces albus
  CDS (1)..(141)
atgaaacgtcagaaacacagcaacgtcaataccaccgtccagcggtatgagacaccgcgattgatgccggtcggttcactcgttgatgtcgtccttggcgaccagttccaagacaccaacgagggtcgtcgcaactactac

SEQ ID NO: 2394 - protein, 47 aa, Haloglycomyces albus
MKRQKHSNVNTTVQRYETPRLMPVGSLVDVVLGDQFQDTNEGRRNYY

SEQ ID NO: 2395 - DNA, 90 bp, Streptomyces xiamenensis; identical to SEQ ID NO: 2391
  CDS (1)..(90)

SEQ ID NO: 2396 - protein, 30 aa, Streptomyces xiamenensis; identical to SEQ ID NO: 2392

SEQ ID NO: 2397 - DNA, 168 bp, Streptomyces clavuligerus
gtgccgcggacacgcagtccgcggcaccgggaaccgacagttccactccgctcctcgcgctgcctgagtccttccccatcgagggatcgaccctcgggcgtctgccgatcgaccctcgggcgtctgccgaacgacgacgcggacaagtcaggcgccatgtacttcacg

SEQ ID NO: 2398 - protein, 56 aa, Streptomyces clavuligerus
MPRTRSPRHREPTVPLRSSRCLSPSPSRDRPSGVCRSTLGRLPNDDADKSGAMYFT

SEQ ID NO: 2399 - DNA, 138 bp, Streptomyces sp.
  CDS (1)..(138)
atgatcgacacctgcaacgagaacagcgacaccgctcccgagaagaaatcggtggcggtcgaccttggcgatgtcgctgagctgaccgagggccaaggcggcggacagtcggaggacaagcgccgcgcgtacaactgc

SEQ ID NO: 2400 - protein, 46 aa, Streptomyces sp.
MIDTCNENSDTAPEKKSVAVDLGDVAELTEGQGGGQSEDKRRAYNC

SEQ ID NO: 2401 - DNA, 141 bp, Rubidibacter lacunae; identical to SEQ ID NO: 1541
  CDS (1)..(141)

SEQ ID NO: 2402 - protein, 47 aa, Rubidibacter lacunae; identical to SEQ ID NO: 1542

SEQ ID NO: 2403 - DNA, 132 bp, Stackebrandtia nassauensis
  CDS (1)..(132)
atgaacaccaagaaaacgcccgcgcggcgcacccgttacgcccgcccgaccgtgacgctgctgggcgacgcggtgaagctgaccaacggcgggcagtacaacgacactcacgacagccgccagtactactac

SEQ ID NO: 2404 - protein, 44 aa, Stackebrandtia nassauensis
MNTKKTPARRTRYARPTVTLLGDAVKLTNGGQYNDTHDSRQYYY

SEQ ID NO: 2405 - DNA, 132 bp, Streptomyces baarnensis
  CDS (1)..(132)
atgaacccacttcagatcgcggagaacaccgacgagaacgacctgctccctgtcgagatcggtgaagcgaccgtgctcaccgagggtcagggcggcggccagagcgaagacaagcgccgcgcctacaacagc

SEQ ID NO: 2406 - protein, 44 aa, Streptomyces baarnensis
MNPLQIAENTDENDLLPVEIGEATVLTEGQGGGQSEDKRRAYNS

SEQ ID NO: 2407 - DNA, 132 bp, Stackebrandtia nassauensis; identical to SEQ ID NO: 2403
  CDS (1)..(132)

SEQ ID NO: 2408 - protein, 44 aa, Stackebrandtia nassauensis; identical to SEQ ID NO: 2404

SEQ ID NO: 2409 - DNA, 135 bp, Nocardiopsis halotolerans
gtgtccgagaacgacaacaccccccagcccgtggcctatgagcccccgaccctgaccgacctcggtgacgcccgcgcgctcacgctcggctccgcccagaacgacaccgctgacctgaaccaggcccgctacaac

SEQ ID NO: 2410 - protein, 45 aa, Nocardiopsis halotolerans
MSENDNTPQPVAYEPPTLTDLGDARALTLGSAQNDTADLNQARYN

SEQ ID NO: 2411 - DNA, 108 bp, Shimazuella kribbensis
  CDS (1)..(108)
atggaaaaagattatcaagcaccagaacttatagaaattggtacattcgaagaaatgactttaggatcaaagtatgatgacactgctgacaaaaatgcacatcgttat

SEQ ID NO: 2412 - protein, 36 aa, Shimazuella kribbensis
MEKDYQAPELIEIGTFEEMTLGSKYDDTADKNAHRY

SEQ ID NO: 2413 - DNA, 111 bp, Nocardiopsis kunsanensis
  CDS (1)..(111)
atggaagagccgccagaggaaacaccgaccgtgatcgatctcggtgacgcggctgccctgacccaaggcagcgacgaccagagcgtcgagagcaagcagtcaccctatgac

SEQ ID NO: 2414 - protein, 37 aa, Nocardiopsis kunsanensis
MEEPPEETPTVIDLGDAAALTQGSDDQSVESKQSPYD

SEQ ID NO: 2415 - DNA, 243 bp, Nocardiopsis sp.
gtgtattccgcttctcatcgcttcagcctctccctagcctcagaacctggaagcaccagtacggaatccggctggtgcggtcgagaagaactccatccgagcgaggaggaccgcgtggttcccagcgaagaacacgccccggtgacccctgagccccagaccgagatcgacctgggcgatgtggccgaactgaccgaagggatcggcaagtccagttccgaggccaagcgccagccctacaac

SEQ ID NO: 2416 - protein, 81 aa, Nocardiopsis sp.
MYSASHRFSLSLASEPGSTSTESGWCGREELHPSEEDRVVPSEEHAPVTPEPQTEIDLGDVAELTEGIGKSSSEAKRQPYN

SEQ ID NO: 2417 - DNA, 129 bp, Streptomyces venezuelae
  CDS (1)..(129)
atgaccgatctgccgcgtacggaggaggccccggccggggcggaggtgctcgacatcggtgacgccgccgagctgacccagggccagggcggcggccagagcgaggacaagcggcgggcctacaactgc

SEQ ID NO: 2418 - protein, 43 aa, Streptomyces venezuelae
MTDLPRTEEAPAGAEVLDIGDAAELTQGQGGGQSEDKRRAYNC

SEQ ID NO: 2419 - DNA, 129 bp, Streptomyces sp.; identical to SEQ ID NO: 1763
  CDS (1)..(129)

SEQ ID NO: 2420 - protein, 43 aa, Streptomyces sp.; identical to SEQ ID NO: 1764

SEQ ID NO: 2421 - DNA, 144 bp, Lechevalieria aerocolonigenes
  CDS (1)..(144)
atgtcggccggtacttggaccccgagcgggtctgttagcaacgagaagtacgagaagccctcgatcaccgaggctggtggggttgtcgccttgaccaacgggtctggcgcggacgacaccgccgacatgaacaagtactactac

SEQ ID NO: 2422 - protein, 48 aa, Lechevalieria aerocolonigenes
MSAGTWTPSGSVSNEKYEKPSITEAGGVVALTNGSGADDTADMNKYYY

SEQ ID NO: 2423 - DNA, 132 bp, Streptomyces avicenniae
  CDS (1)..(132)
atggagcagcagaccgccgaggtctacgccccgcccctcgtgctggacgccggtgatgtcaccgaggtgacgttggggtcgaacaacttcgacaccgcggacgacacccagtacgtcaagtccgaggacgac

SEQ ID NO: 2424 - protein, 44 aa, Streptomyces avicenniae
MEQQTAEVYAPPLVLDAGDVTEVTLGSNNFDTADDTQYVKSEDD

SEQ ID NO: 2425 - DNA, 120 bp, Streptomyces bicolor
  CDS (1)..(120)
atgcagcaggaacagcactccagcagcctccccgtgctgcacacggaggacgtcgacgcggtgaccctcggccgcgacatggagggataccgcgaaggcgcgctggagtgggtccgcatc

SEQ ID NO: 2426 - protein, 40 aa, Streptomyces bicolor
MQQEQHSSSLPVLHTEDVDAVTLGRDMEGYREGALEWVRI

SEQ ID NO: 2427 - DNA, 150 bp, Streptomyces bicolor
gtgaacgccaccatcacccagaccgccccggacaccgcggccaccgtggccaccgcgcagctgcccgtcctggcgtcggccgacgtcgacgaggtcaccctcggccgccaggccttcaacgactccgacaagtcgaactacttcgagggc

SEQ ID NO: 2428 - protein, 50 aa, Streptomyces bicolor
MNATITQTAPDTAATVATAQLPVLASADVDEVTLGRQAFNDSDKSNYFEG

SEQ ID NO: 2429 - DNA, 165 bp, Streptomyces aurantiacus
  CDS (1)..(165)
atggccgagcagaccaccgtcaccaccaagtccgccgcgtccaagcccagcaccgcgccgagcggcggcggtttcgcgccgcagatcagcgcccacccggtggccaccctcacccagggccgccagacgttcaacgactcggacaaggacaactacttcgagggc

SEQ ID NO: 2430 - protein, 55 aa, Streptomyces aurantiacus
MAEQTTVTTKSAASKPSTAPSGGGFAPQISAHPVATLTQGRQTFNDSDKDNYFEG

SEQ ID NO: 2431 - DNA, 132 bp, Promicromonospora kroppenstedtii
  CDS (1)..(132)
atggagagcgacgcgatcacgacggcggccgagcccacggagcaggaagtgactgacctcggcggcatcgtcacgctcacagagggcagcaagaagaaggccggcacagaggacaagcggtacgcctaccgc

SEQ ID NO: 2432 - protein, 44 aa, Promicromonospora kroppenstedtii
MESDAITTAAEPTEQEVTDLGGIVTLTEGSKKKAGTEDKRYAYR

SEQ ID NO: 2433 - DNA, 168 bp, Streptomyces albus
  CDS (1)..(168)
atggccgagcagaccatcgtcaccaccaagcccaccgtcgaggacacccccgccgcagcgccgagcacgggcggcttcgcgccgcagatcagcacccacccggtggccaccctcaccctgggccgccagacgttcaacgactcggacaagtcgaactacttcgaaggc

SEQ ID NO: 2434 - protein, 56 aa, Streptomyces albus
MAEQTIVTTKPTVEDTPAAAPSTGGFAPQISTHPVATLTLGRQTFNDSDKSNYFEG

SEQ ID NO: 2435 - DNA, 138 bp, Nocardia sp.
  CDS (1)..(138)
atgaggaagaccacccggttccacgtcgtggacgtggactacgaaccgcctgtgctcgaaacgccgggccacgtccggcgaatcacgctgggcagttcgccgagcggcaacgccgacgcgaactcgcagtactactgg

SEQ ID NO: 2436 - protein, 46 aa, Nocardia sp.
MRKTTRFHVVDVDYEPPVLETPGHVRRITLGSSPSGNADANSQYYW

SEQ ID NO: 2437 - DNA, 141 bp, Novosphingobium sp.
  CDS (1)..(141)
atgacccgtgaaatcgaacagcgtgacgaacatctcaccgacctcggtgcagtcaccgctgaaaccaagggccagggcggcgtccagcttccggacgtcgagaccgggctgcgctacaatatcgccggcctcagcgacgat

SEQ ID NO: 2438 - protein, 47 aa, Novosphingobium sp.
MTREIEQRDEHLTDLGAVTAETKGQGGVQLPDVETGLRYNIAGLSDD

SEQ ID NO: 2439 - DNA, 153 bp, Streptomyces sp.
  CDS (1)..(153)
atggccatcaacgccaccaccccgatcaacgagcaggctgacgagaaggtcgcccagggcttcgccccgcacgtcgctgcccacgacgtggacgaggtgaccctcggccggcaggacttcaacgactcggacaagaccaactacttcgagggc

SEQ ID NO: 2440 - protein, 51 aa, Streptomyces sp.
MAINATTPINEQADEKVAQGFAPHVAAHDVDEVTLGRQDFNDSDKTNYFEG

SEQ ID NO: 2441 - DNA, 168 bp, Streptomyces albus; identical to SEQ ID NO: 2433
  CDS (1)..(168)

SEQ ID NO: 2442 - protein, 56 aa, Streptomyces albus; identical to SEQ ID NO: 2434

SEQ ID NO: 2443 - DNA, 144 bp, Lechevalieria aerocolonigenes; identical to SEQ ID NO: 2421
  CDS (1)..(144)

SEQ ID NO: 2444 - protein, 48 aa, Lechevalieria aerocolonigenes; identical to SEQ ID NO: 2422

SEQ ID NO: 2445 - DNA, 117 bp, Actinoalloteichus spitiensis
  CDS (1)..(117)
atggaccagatccaacccgagcaggttccggacgagctgttcgtcctgggagacgtggtcgacctcaccgagggtgagggcttcgatcggtcggagaacaagcgcaacatctacaac

SEQ ID NO: 2446 - protein, 39 aa, Actinoalloteichus spitiensis
MDQIQPEQVPDELFVLGDVVDLTEGEGFDRSENKRNIYN

SEQ ID NO: 2447 - DNA, 105 bp, Rothia dentocariosa; identical to SEQ ID NO: 1625
  CDS (1)..(105)

SEQ ID NO: 2448 - protein, 35 aa, Rothia dentocariosa; identical to SEQ ID NO: 1626

SEQ ID NO: 2449 - DNA, 96 bp, Rothia dentocariosa; identical to SEQ ID NO: 1627
  CDS (1)..(96)

SEQ ID NO: 2450 - protein, 32 aa, Rothia dentocariosa; identical to SEQ ID NO: 1628

SEQ ID NO: 2451 - DNA, 123 bp, Streptomyces sp.
  CDS (1)..(123)
atggacgcgaacaccaccccggtctacaccgcgcctctcgtgctggacggcggcgacgtcgtcaaggtgacgctgggcaccaacaacttcgacaccgccgacgacacccagtacaagaacgcc

SEQ ID NO: 2452 - protein, 41 aa, Streptomyces sp.
MDANTTPVYTAPLVLDGGDVVKVTLGTNNFDTADDTQYKNA

SEQ ID NO: 2453 - DNA, 90 bp, Streptomyces sp.
  CDS (1)..(90)
atgccgctgctgcacaccgagccggtcgacgaggtgaccctgggccgcgggacggagacccgcgaggccacccacacctacgacatggtc

SEQ ID NO: 2454 - protein, 30 aa, Streptomyces sp.
MPLLHTEPVDEVTLGRGTETREATHTYDMV

SEQ ID NO: 2455 - DNA, 126 bp, Streptomyces sp.
  CDS (1)..(126)
atgcagaacatcgccatcgagaccaccgctcccgaggttccggcgctggtcatcgagccggtggacgagatcaccctcggccgccagagcttcaacgactcggacaagtcgaactacttcgagaac

SEQ ID NO: 2456 - protein, 42 aa, Streptomyces sp.
MQNIAIETTAPEVPALVIEPVDEITLGRQSFNDSDKSNYFEN

SEQ ID NO: 2457 - DNA, 255 bp, Streptomyces sp.
  CDS (1)..(255)
atgggggtaccgcgagggtaccggcaactccttttccgtggtcgctggttggcgtgtactggcgatgtcgggacgccaccggggcggaccgccgaacacgaggagggtcccgtgtcccaccccaccagcactccgcttaccggcatcaccacgaccggggaggcggccatgatcatcgatctcggcgacgcagccgacctgaccctgggcggcgactccgactcctccgagaacaagcagagcccgtacagccac

SEQ ID NO: 2458 - protein, 85 aa, Streptomyces sp.
MGVPRGYRQLLFRGRWLACTGDVGTPPGRTAEHEEGPVSHPTSTPLTGITTTGEAAMIIDLGDAADLTLGGDSDSSENKQSPYSH

SEQ ID NO: 2459 - DNA, 138 bp, Streptomyces sp.
  CDS (1)..(138)
atggacatcgagatcgagggcaccgagaccgggaccgcgtacgtggcgccggccgtggacgacctgggcgacgtcaccgaggtcaccctcgggtcgggcggcttcaacaaccccgactccaccatgtactggcagggc

SEQ ID NO: 2460 - protein, 46 aa, Streptomyces sp.
MDIEIEGTETGTAYVAPAVDDLGDVTEVTLGSGGFNNPDSTMYWQG

SEQ ID NO: 2461 - DNA, 171 bp, Streptomyces peucetius
  CDS (1)..(171)
atgaccgagcagaccaccgccatcccccagcccgccgtcgcggacacctccggccaggcgccgcgtaccggcggcttcgcgccgcaggtcgacacccacccggtgggcgccttcaccctggggcgccagaacgccaacgactcggacaagtcgaactacttcgaagcctcc

SEQ ID NO: 2462 - protein, 57 aa, Streptomyces peucetius
MTEQTTAIPQPAVADTSGQAPRTGGFAPQVDTHPVGAFTLGRQNANDSDKSNYFEAS

SEQ ID NO: 2463 - DNA, 129 bp, Streptomyces sp.; identical to SEQ ID NO: 1763
  CDS (1)..(129)

SEQ ID NO: 2464 - protein, 43 aa, Streptomyces sp.; identical to SEQ ID NO: 1764

SEQ ID NO: 2465 - DNA, 150 bp, Streptomyces sp.
  CDS (1)..(150)
atggagaacgtgccggagaacggggccgatcgggcagagcgcggccgagcggtcgaggagccggtgttgctggtcagtctcggcgaggtgtccgcggcgacccagggcctaggcatgggccactcggaggacaagcggcgggcctacaac

SEQ ID NO: 2466 - protein, 50 aa, Streptomyces sp.
MENVPENGADRAERGRAVEEPVLLVSLGEVSAATQGLGMGHSEDKRRAYN

SEQ ID NO: 2467 - DNA, 138 bp, Roseobacter denitrificans
  CDS (1)..(138)
atgactaaagctgtatacgaagcgcctgtactgcgctcgcatggcaaagttgaggccgtaacaaaaggtggttccacaggttccagccttgacgcggcattcccagctggcacgccattcacagacttgacactgtcc

SEQ ID NO: 2468 - protein, 46 aa, Roseobacter denitrificans
MTKAVYEAPVLRSHGKVEAVTKGGSTGSSLDAAFPAGTPFTDLTLS

SEQ ID NO: 2469 - DNA, 141 bp, Frankia sp.; identical to SEQ ID NO: 869
  CDS (1)..(141)

SEQ ID NO: 2470 - protein, 47 aa, Frankia sp.; identical to SEQ ID NO: 870

SEQ ID NO: 2471 - DNA, 141 bp, Novosphingobium sp.; identical to SEQ ID NO: 2437
  CDS (1)..(141)

SEQ ID NO: 2472 - protein, 47 aa, Novosphingobium sp.; identical to SEQ ID NO: 2438

SEQ ID NO: 2473 - DNA, 165 bp, Streptomyces clavuligerus
  CDS (1)..(165)
atgtccatcagtccttccgcacagtcggccgagcccggggtggaggtctcccccgccctcgtcttcggcctgccggccggcttcagcgccgaggagtccacgctggggcagcagaacttcaacgacgccgacaccggtggcaccaattacttcgagagcgccagc

SEQ ID NO: 2474 - protein, 55 aa, Streptomyces clavuligerus
MSISPSAQSAEPGVEVSPALVFGLPAGFSAEESTLGQQNFNDADTGGTNYFESAS

SEQ ID NO: 2475 - DNA, 141 bp, Herbidospora cretacea
  CDS (1)..(141)
atgtcagcagaggggcccgaactgccgtcgccggagaccgactatgagccgcccaccctcatccgcctcggccgggtcaccgaactgttcggcggaaactccagcagcggaaacgccgacgcgaattccgactattactgg

SEQ ID NO: 2476 - protein, 47 aa, Herbidospora cretacea
MSAEGPELPSPETDYEPPTLIRLGRVTELFGGNSSSGNADANSDYYW

SEQ ID NO: 2477 - DNA, 126 bp, Propionibacterium acidifaciens; identical to SEQ ID NO: 1279
  CDS (1)..(126)

SEQ ID NO: 2478 - protein, 42 aa, Propionibacterium acidifaciens; identical to SEQ ID NO: 1280

SEQ ID NO: 2479 - DNA, 141 bp, Frankia sp.; identical to SEQ ID NO: 869
  CDS (1)..(141)

SEQ ID NO: 2480 - protein, 47 aa, Frankia sp.; identical to SEQ ID NO: 870

SEQ ID NO: 2481 - DNA, 120 bp, Lactococcus garvieae; identical to SEQ ID NO: 1549
  CDS (1)..(120)

SEQ ID NO: 2482 - protein, 40 aa, Lactococcus garvieae; identical to SEQ ID NO: 1550

SEQ ID NO: 2483 - DNA, 126 bp, Lactococcus garvieae; identical to SEQ ID NO: 1551
  CDS (1)..(126)

SEQ ID NO: 2484 - protein, 42 aa, Lactococcus garvieae; identical to SEQ ID NO: 1552

SEQ ID NO: 2485 - DNA, 138 bp, Jiangella alkaliphila
  CDS (1)..(138)
atggcagaccgcgaccactacccgggctcggcggaacaagacagcaacccggacgctgcgatcgctctcggcgatgcaaccgccctgacgaagggcggagcggagaagagcatcgaggccaaacaacgcccgtacgac

SEQ ID NO: 2486 - protein, 46 aa, Jiangella alkaliphila
MADRDHYPGSAEQDSNPDAAIALGDATALTKGGAEKSIEAKQRPYD

SEQ ID NO: 2487 - DNA, 132 bp, Acinetobacter gyllenbergii
  CDS (1)..(132)
atgttcaaaaaagagcagaaatatcataaacaattgaaagttatttctgttaaaggaagtgcttcaaaaatgacgctaggaggaaaaggtccaatttttgagacttgggtaacagaaggaaactactacggc

SEQ ID NO: 2488 - protein, 44 aa, Acinetobacter gyllenbergii
MFKKEQKYHKQLKVISVKGSASKMTLGGKGPIFETWVTEGNYYG

SEQ ID NO: 2489 - DNA, 171 bp, Achromobacter sp.
  CDS (1)..(171)
atgcagaccacacgtccaatccaatccgattccgaaatccaaatcctgagtatcgcaactcctgcgaccaaattaacccaaggcggtggcggccccacgcccgaatatttcctcatgcctattgacccagcatggttgcaagccaatctcccaaacaccggcaaatataac

SEQ ID NO: 2490 - protein, 57 aa, Achromobacter sp.
MQTTRPIQSDSEIQILSIATPATKLTQGGGGPTPEYFLMPIDPAWLQANLPNTGKYN

SEQ ID NO: 2491 - DNA, 150 bp, Mesorhizobium ciceri; identical to SEQ ID NO: 841
  CDS (1)..(150)

SEQ ID NO: 2492 - protein, 50 aa, Mesorhizobium ciceri; identical to SEQ ID NO: 842

SEQ ID NO: 2493 - DNA, 96 bp, Actinomyces israelii
  CDS (1)..(96)
atggtggtgctcggagacttctccgacgtcactcggtgcctgtggtggggggattgtcgggattttctcggctgcggactcgttcccatctgcatc

SEQ ID NO: 2494 - protein, 32 aa, Actinomyces israelii
MVVLGDFSDVTRCLWWGDCRDFLGCGLVPICI

SEQ ID NO: 2495 - DNA, 132 bp, Streptomyces sp.
  CDS (1)..(132)
atggatcacaagcacaccacggacacgcccgaagagttcgacgttccgccggtcatcattctgggcaacgctgccacgctgacgcggggcggtgaaaactcgggagtcgaggcgaaacagacgccgtacgac

SEQ ID NO: 2496 - protein, 44 aa, Streptomyces sp.
MDHKHTTDTPEEFDVPPVIILGNAATLTRGGENSGVEAKQTPYD

SEQ ID NO: 2497 - DNA, 120 bp, Lactococcus garvieae; identical to SEQ ID NO: 1549
  CDS (1)..(120)

SEQ ID NO: 2498 - protein, 40 aa, Lactococcus garvieae; identical to SEQ ID NO: 1550

SEQ ID NO: 2499 - DNA, 126 bp, Lactococcus garvieae; identical to SEQ ID NO: 1551
  CDS (1)..(126)

SEQ ID NO: 2500 - protein, 42 aa, Lactococcus garvieae; identical to SEQ ID NO: 1552

SEQ ID NO: 2501 - DNA, 144 bp, Thermoactinomyces vulgaris
  CDS (1)..(144)
atggaaaaacaaaaagaaactaaaaaagaatactcatctccaaggttgatcgaactgggcgacattgtagagataacttttggaggaaaacccggctggggtagcgatacctattcccaaagataccctcgtagcgacgaagac

SEQ ID NO: 2502 - protein, 48 aa, Thermoactinomyces vulgaris
MEKQKETKKEYSSPRLIELGDIVEITFGGKPGWGSDTYSQRYPRSDED

SEQ ID NO: 2503 - DNA, 138 bp, Sphingobium yanoikuyae; identical to SEQ ID NO: 941
  CDS (1)..(138)

SEQ ID NO: 2504 - protein, 46 aa, Sphingobium yanoikuyae; identical to SEQ ID NO: 942

SEQ ID NO: 2505 - DNA, 99 bp, Actinokineospora enzanensis
  CDS (1)..(99)
atggagcccatcggcccgttgctggacctcggtgacgccgccgaactgaccctgggggtcggccgctcgaccaacgaggacaagcgctacatctacaac

SEQ ID NO: 2506 - protein, 33 aa, Actinokineospora enzanensis
MEPIGPLLDLGDAAELTLGVGRSTNEDKRYIYN

SEQ ID NO: 2507 - DNA, 162 bp, Mesorhizobium sp.
gtggagagtaaattggaacagaatgttgaaaagcatgagtacgaaacccctagcctgacggtccacggctcgatcgagaccatcacgcaaggcggtagcggtactacggcactcgacgcctcgtttccggcacatacgccggtcggcgaactcaccttctcc

SEQ ID NO: 2508 - protein, 54 aa, Mesorhizobium sp.
MESKLEQNVEKHEYETPSLTVHGSIETITQGGSGTTALDASFPAHTPVGELTFS

SEQ ID NO: 2509 - DNA, 138 bp, Sphingomonas melonis
  CDS (1)..(138)
atgcaacggaagaacgacaagcgggacgtgaagcgcctcgatctcggcggggtcatgcagcagaccaagggcggcgccatgtcggtcaacgacaaccagaacgggcttcgtccgatcttcggcggtctcaccgccgac

SEQ ID NO: 2510 - protein, 46 aa, Sphingomonas melonis
MQRKNDKRDVKRLDLGGVMQQTKGGAMSVNDNQNGLRPIFGGLTAD

SEQ ID NO: 2511 - DNA, 162 bp, Mesorhizobium sp.; identical to SEQ ID NO: 2507

SEQ ID NO: 2512 - protein, 54 aa, Mesorhizobium sp.; identical to SEQ ID NO: 2508

SEQ ID NO: 2513 - DNA, 162 bp, Mesorhizobium sp.; identical to SEQ ID NO: 2507

SEQ ID NO: 2514 - protein, 54 aa, Mesorhizobium sp.; identical to SEQ ID NO: 2508

SEQ ID NO: 2515 - DNA, 162 bp, Mesorhizobium sp.; identical to SEQ ID NO: 2507

SEQ ID NO: 2516 - protein, 54 aa, Mesorhizobium sp.; identical to SEQ ID NO: 2508

SEQ ID NO: 2517 - DNA, 162 bp, Mesorhizobium sp.; identical to SEQ ID NO: 2507

SEQ ID NO: 2518 - protein, 54 aa, Mesorhizobium sp.; identical to SEQ ID NO: 2508

SEQ ID NO: 2519 - DNA, 162 bp, Mesorhizobium sp.; identical to SEQ ID NO: 2507

SEQ ID NO: 2520 - protein, 54 aa, Mesorhizobium sp.; identical to SEQ ID NO: 2508

SEQ ID NO: 2521 - DNA, 162 bp, Mesorhizobium sp.; identical to SEQ ID NO: 2507

SEQ ID NO: 2522 - protein, 54 aa, Mesorhizobium sp.; identical to SEQ ID NO: 2508

SEQ ID NO: 2523 - DNA, 162 bp, Mesorhizobium sp.; identical to SEQ ID NO: 2507

SEQ ID NO: 2524 - protein, 54 aa, Mesorhizobium sp.; identical to SEQ ID NO: 2508

SEQ ID NO: 2525 - DNA, 141 bp, Frankia sp.; identical to SEQ ID NO: 869
  CDS (1)..(141)

SEQ ID NO: 2526 - protein, 47 aa, Frankia sp.; identical to SEQ ID NO: 870

SEQ ID NO: 2527 - DNA, 162 bp, Mesorhizobium sp.; identical to SEQ ID NO: 2507

SEQ ID NO: 2528 - protein, 54 aa, Mesorhizobium sp.; identical to SEQ ID NO: 2508

SEQ ID NO: 2529 - DNA, 150 bp, Mesorhizobium ciceri; identical to SEQ ID NO: 841
  CDS (1)..(150)

SEQ ID NO: 2530 - protein, 50 aa, Mesorhizobium ciceri; identical to SEQ ID NO: 842

SEQ ID NO: 2531 - DNA, 150 bp, Mesorhizobium ciceri; identical to SEQ ID NO: 841
  CDS (1)..(150)

SEQ ID NO: 2532 - protein, 50 aa, Mesorhizobium ciceri; identical to SEQ ID NO: 842

SEQ ID NO: 2533 - DNA, 117 bp, Nocardiopsis salina
  CDS (1)..(117)
atggcttctccctcggccgtggagtccgaggagatggttgtcgatctgggtgacgcagccgacctgaccctcggtgagggccagtcggaaaacgaggacaagcgcaagatctacaac

SEQ ID NO: 2534 - protein, 39 aa, Nocardiopsis salina
MASPSAVESEEMVVDLGDAADLTLGEGQSENEDKRKIYN

SEQ ID NO: 2535 - DNA, 156 bp, Pseudonocardia acaciae; identical to SEQ ID NO: 873
  CDS (1)..(156)

SEQ ID NO: 2536 - protein, 52 aa, Pseudonocardia acaciae; identical to SEQ ID NO: 874

SEQ ID NO: 2537 - DNA, 195 bp, Pseudonocardia acaciae; identical to SEQ ID NO: 875

SEQ ID NO: 2538 - protein, 65 aa, Pseudonocardia acaciae; identical to SEQ ID NO: 876

SEQ ID NO: 2539 - DNA, 159 bp, Pseudonocardia acaciae; identical to SEQ ID NO: 877
  CDS (1)..(159)

SEQ ID NO: 2540 - protein, 53 aa, Pseudonocardia acaciae; identical to SEQ ID NO: 878

SEQ ID NO: 2541 - DNA, 162 bp, Mesorhizobium sp.; identical to SEQ ID NO: 2507

SEQ ID NO: 2542 - protein, 54 aa, Mesorhizobium sp.; identical to SEQ ID NO: 2508

SEQ ID NO: 2543 - DNA, 138 bp, Thioclava indica
  CDS (1)..(138)
atgcaaaagaaaacttacgctacgccgactttgcgtcaacacggtaagcttgaggacatgacacatggccagagcaccggatcggaactggatcatatgttcccggatggcactccgttcagccatctgaccttttcc

SEQ ID NO: 2544 - protein, 46 aa, Thioclava indica
MQKKTYATPTLRQHGKLEDMTHGQSTGSELDHMFPDGTPFSHLTFS

SEQ ID NO: 2545 - DNA, 162 bp, Mesorhizobium sp.; identical to SEQ ID NO: 2507

SEQ ID NO: 2546 - protein, 54 aa, Mesorhizobium sp.; identical to SEQ ID NO: 2508

SEQ ID NO: 2547 - DNA, 162 bp, Mesorhizobium sp.; identical to SEQ ID NO: 2507

SEQ ID NO: 2548 - protein, 54 aa, Mesorhizobium sp.; identical to SEQ ID NO: 2508

SEQ ID NO: 2549 - DNA, 162 bp, Mesorhizobium sp.; identical to SEQ ID NO: 2507

SEQ ID NO: 2550 - protein, 54 aa, Mesorhizobium sp.; identical to SEQ ID NO: 2508

SEQ ID NO: 2551 - DNA, 162 bp, Mesorhizobium sp.; identical to SEQ ID NO: 2507

SEQ ID NO: 2552 - protein, 54 aa, Mesorhizobium sp.; identical to SEQ ID NO: 2508

SEQ ID NO: 2553 - DNA, 111 bp, Thioclava dalianensis
  CDS (1)..(111)
atgctgcagaagcacggtaagcttgaagcccgtacccatggcgcttcgaccggttcgtcgctggacgcggctttcccgtccgggaccgacttcggcgatctcaccttctcg

SEQ ID NO: 2554 - protein, 37 aa, Thioclava dalianensis
MLQKHGKLEARTHGASTGSSLDAAFPSGTDFGDLTFS

SEQ ID NO: 2555 - DNA, 162 bp, Mesorhizobium sp.; identical to SEQ ID NO: 2507

SEQ ID NO: 2556 - protein, 54 aa, Mesorhizobium sp.; identical to SEQ ID NO: 2508

SEQ ID NO: 2557 - DNA, 138 bp, Nonomuraea coxensis; identical to SEQ ID NO: 1819
  CDS (1)..(138)

SEQ ID NO: 2558 - protein, 46 aa, Nonomuraea coxensis; identical to SEQ ID NO: 1820

SEQ ID NO: 2559 - DNA, 87 bp, Streptomyces sp.
  CDS (1)..(87)
atgtccgtcgacctcggcgacgccgccgacctgacgctgggcggcgacaacgactcctccgagaacaagcagagcccgtacagccac

SEQ ID NO: 2560 - protein, 29 aa, Streptomyces sp.
MSVDLGDAADLTLGGDNDSSENKQSPYSH

SEQ ID NO: 2561 - DNA, 162 bp, Mesorhizobium sp.; identical to SEQ ID NO: 2507

SEQ ID NO: 2562 - protein, 54 aa, Mesorhizobium sp.; identical to SEQ ID NO: 2508

SEQ ID NO: 2563 - DNA, 162 bp, Mesorhizobium sp.; identical to SEQ ID NO: 2507

SEQ ID NO: 2564 - protein, 54 aa, Mesorhizobium sp.; identical to SEQ ID NO: 2508

SEQ ID NO: 2565 - DNA, 150 bp, Mesorhizobium ciceri; identical to SEQ ID NO: 841
  CDS (1)..(150)

SEQ ID NO: 2566 - protein, 50 aa, Mesorhizobium ciceri; identical to SEQ ID NO: 842

SEQ ID NO: 2567 - DNA, 162 bp, Mesorhizobium sp.; identical to SEQ ID NO: 2507

SEQ ID NO: 2568 - protein, 54 aa, Mesorhizobium sp.; identical to SEQ ID NO: 2508

SEQ ID NO: 2569 - DNA, 162 bp, Mesorhizobium sp.; identical to SEQ ID NO: 2507

SEQ ID NO: 2570 - protein, 54 aa, Mesorhizobium sp.; identical to SEQ ID NO: 2508

SEQ ID NO: 2571 - DNA, 150 bp, Mesorhizobium sp.
  CDS (1)..(150)
atggaacagaatgttgaaaagcatgagtatgaaacgccaaacctgacggtacatggttcaattgaaaccattacgcagggcggcggtggcagcacggcactcgacgcgtcgtttcccgcgcacaccccgatcggcgacctgactttctcc

SEQ ID NO: 2572 - protein, 50 aa, Mesorhizobium sp.
MEQNVEKHEYETPNLTVHGSIETITQGGGGSTALDASFPAHTPIGDLTFS

SEQ ID NO: 2573 - DNA, 150 bp, Mesorhizobium ciceri; identical to SEQ ID NO: 841
  CDS (1)..(150)

SEQ ID NO: 2574 - protein, 50 aa, Mesorhizobium ciceri; identical to SEQ ID NO: 842

SEQ ID NO: 2575 - DNA, 162 bp, Mesorhizobium sp.; identical to SEQ ID NO: 2507

SEQ ID NO: 2576 - protein, 54 aa, Mesorhizobium sp.; identical to SEQ ID NO: 2508

SEQ ID NO: 2577 - DNA, 150 bp, Mesorhizobium ciceri; identical to SEQ ID NO: 841
  CDS (1)..(150)

SEQ ID NO: 2578 - protein, 50 aa, Mesorhizobium ciceri; identical to SEQ ID NO: 842

SEQ ID NO: 2579 - DNA, 162 bp, Mesorhizobium sp.; identical to SEQ ID NO: 2507

SEQ ID NO: 2580 - protein, 54 aa, Mesorhizobium sp.; identical to SEQ ID NO: 2508

SEQ ID NO: 2581 - DNA, 162 bp, Mesorhizobium sp.; identical to SEQ ID NO: 2507

SEQ ID NO: 2582 - protein, 54 aa, Mesorhizobium sp.; identical to SEQ ID NO: 2508

SEQ ID NO: 2583 - DNA, 150 bp, Mesorhizobium ciceri; identical to SEQ ID NO: 841
  CDS (1)..(150)

SEQ ID NO: 2584 - protein, 50 aa, Mesorhizobium ciceri; identical to SEQ ID NO: 842

SEQ ID NO: 2585 - DNA, 162 bp, Mesorhizobium sp.; identical to SEQ ID NO: 2507

SEQ ID NO: 2586 - protein, 54 aa, Mesorhizobium sp.; identical to SEQ ID NO: 2508

SEQ ID NO: 2587 - DNA, 150 bp, Mesorhizobium ciceri; identical to SEQ ID NO: 841
  CDS (1)..(150)

SEQ ID NO: 2588 - protein, 50 aa, Mesorhizobium ciceri; identical to SEQ ID NO: 842

SEQ ID NO: 2589 - DNA, 150 bp, Mesorhizobium sp.; identical to SEQ ID NO: 2231
  CDS (1)..(150)

SEQ ID NO: 2590 - protein, 50 aa, Mesorhizobium sp.; identical to SEQ ID NO: 2232

SEQ ID NO: 2591 - DNA, 105 bp, Bradyrhizobium sp.
  CDS (1)..(105)
atggtgcaggacctcggggacgctaccgagctcacaaaaggctttgggggctcgtggcgcgcagaacacaccacgggcgattattattacatggatgattccgat

SEQ ID NO: 2592 - protein, 35 aa, Bradyrhizobium sp.
MVQDLGDATELTKGFGGSWRAEHTTGDYYYMDDSD

SEQ ID NO: 2593 - DNA, 150 bp, Mesorhizobium ciceri; identical to SEQ ID NO: 841
  CDS (1)..(150)

SEQ ID NO: 2594 - protein, 50 aa, Mesorhizobium ciceri; identical to SEQ ID NO: 842

SEQ ID NO: 2595 - DNA, 150 bp, Mesorhizobium ciceri; identical to SEQ ID NO: 841
  CDS (1)..(150)

SEQ ID NO: 2596 - protein, 50 aa, Mesorhizobium ciceri; identical to SEQ ID NO: 842

SEQ ID NO: 2597 - DNA, 150 bp, Mesorhizobium sp.
  CDS (1)..(150)
atggaacagaatgttgaaaggcgtgaatatgaaacgccaagcctgacggtccatggttcgatcgaaaccatcacccagggcggcggcggcaacacggcgaccgacgcatcgtttcccgcgcatacgccgattggcgacctaacattttcc

SEQ ID NO: 2598 - protein, 50 aa, Mesorhizobium sp.
MEQNVERREYETPSLTVHGSIETITQGGGGNTATDASFPAHTPIGDLTFS

SEQ ID NO: 2599 - DNA, 132 bp, Klebsiella pneumoniae
  CDS (1)..(132)
atgcaacagaaaaaaaatgaccagaaaaaagtgactcttaaaaaactcaataagaaagccagtaaagtaacgcgtggatctgatggcccaatcattgagttctttaatccaaatggagttatgcattacggc

SEQ ID NO: 2600 - protein, 44 aa, Klebsiella pneumoniae
MQQKKNDQKKVTLKKLNKKASKVTRGSDGPIIEFFNPNGVMHYG

SEQ ID NO: 2601 - DNA, 144 bp, Bradyrhizobium sp.
  CDS (1)..(144)
atgaatacgaccgctatcaatgaaaccgctatcaatgacacggtgcaggacctcggggacgccaccgagctcacaaaaggctttgggggctcgtggcgcgcagaacacacgaccggcgattattattacgtggatgagtccgat

SEQ ID NO: 2602 - protein, 48 aa, Bradyrhizobium sp.
MNTTAINETAINDTVQDLGDATELTKGFGGSWRAEHTTGDYYYVDESD

SEQ ID NO: 2603 - DNA, 150 bp, Mesorhizobium australicum
  CDS (1)..(150)
atggaacagaatgttgaaaagcatgagtacgaaacgccaaacctgacagtacatggttcaatcgaaaccattacccaaggcggtggtggcagcacggcaatcgacgcgtcgtttcccgcgcacaccccgattggcgacctgacgttctcc

SEQ ID NO: 2604 - protein, 50 aa, Mesorhizobium australicum
MEQNVEKHEYETPNLTVHGSIETITQGGGGSTAIDASFPAHTPIGDLTFS

SEQ ID NO: 2605 - DNA, 150 bp, Mesorhizobium australicum; identical to SEQ ID NO: 2603
  CDS (1)..(150)

SEQ ID NO: 2606 - protein, 50 aa, Mesorhizobium australicum; identical to SEQ ID NO: 2604

SEQ ID NO: 2607 - DNA, 150 bp, Mesorhizobium australicum; identical to SEQ ID NO: 2603
  CDS (1)..(150)

SEQ ID NO: 2608 - protein, 50 aa, Mesorhizobium australicum; identical to SEQ ID NO: 2604

SEQ ID NO: 2609 - DNA, 132 bp, Klebsiella pneumoniae; identical to SEQ ID NO: 2599
  CDS (1)..(132)

SEQ ID NO: 2610 - protein, 44 aa, Klebsiella pneumoniae; identical to SEQ ID NO: 2600

SEQ ID NO: 2611 - DNA, 138 bp, Roseobacter litoralis
  CDS (1)..(138)
atgactaaagctgtatacgaagcgcctgtactgcgctcgcatggcaaagttgaagctgtaacaaaaggtggttccacaggttcctcccttgacgcagcgttcccagctggcacgccattcgcagacttgacactgtcc

SEQ ID NO: 2612 - protein, 46 aa, Roseobacter litoralis
MTKAVYEAPVLRSHGKVEAVTKGGSTGSSLDAAFPAGTPFADLTLS

SEQ ID NO: 2613 - DNA, 129 bp, Bradyrhizobium sp.
  CDS (1)..(129)
atgaatacaaccgctatcaatgacacggtgctggacctcggggacgccaccgagctcacggaaggccttgggggcgcgtcccgcgccgagcccgcgacgggcgattattatttggagggtgattgcgat

SEQ ID NO: 2614 - protein, 43 aa, Bradyrhizobium sp.
MNTTAINDTVLDLGDATELTEGLGGASRAEPATGDYYLEGDCD

SEQ ID NO: 2615 - DNA, 150 bp, Mesorhizobium australicum; identical to SEQ ID NO: 2603
  CDS (1)..(150)

SEQ ID NO: 2616 - protein, 50 aa, Mesorhizobium australicum; identical to SEQ ID NO: 2604

SEQ ID NO: 2617 - DNA, 153 bp, Fischerella muscicola
  CDS (1)..(153)
atgaagaatcaatccctggagaaagctaaaaattctataccgtcctaccggacgccccaactattagttgctgggacagcagtcgagttagttcgtaacgacattggaggacacctcaaggatggcactggtggctggtgggtttggggttcc

SEQ ID NO: 2618 - protein, 51 aa, Fischerella muscicola
MKNQSLEKAKNSIPSYRTPQLLVAGTAVELVRNDIGGHLKDGTGGWWVWGS

SEQ ID NO: 2619 - DNA, 111 bp, Klebsiella variicola; identical to SEQ ID NO: 833
  CDS (1)..(111)

SEQ ID NO: 2620 - protein, 37 aa, Klebsiella variicola; identical to SEQ ID NO: 834

SEQ ID NO: 2621 - DNA, 150 bp, Mesorhizobium sp.
  CDS (1)..(150)
atggaacagaatgttgaaaagcatgagtacgaaacccccagcctgacggttcacggttcgattgaaacgatcacgcagggcggtgctggcgtcacggcgctcgacgcgagctttcccgcgcacacgccggtcggcgagctgaccttctct

SEQ ID NO: 2622 - protein, 50 aa, Mesorhizobium sp.
MEQNVEKHEYETPSLTVHGSIETITQGGAGVTALDASFPAHTPVGELTFS

SEQ ID NO: 2623 - DNA, 111 bp, Klebsiella variicola; identical to SEQ ID NO: 833
  CDS (1)..(111)

SEQ ID NO: 2624 - protein, 37 aa, Klebsiella variicola; identical to SEQ ID NO: 834

SEQ ID NO: 2625 - DNA, 126 bp, Paenibacillus polymyxa; identical to SEQ ID NO: 829
  CDS (1)..(126)

SEQ ID NO: 2626 - protein, 42 aa, Paenibacillus polymyxa; identical to SEQ ID NO: 830

SEQ ID NO: 2627 - DNA, 126 bp, Paenibacillus polymyxa; identical to SEQ ID NO: 829
  CDS (1)..(126)

SEQ ID NO: 2628 - protein, 42 aa, Paenibacillus polymyxa; identical to SEQ ID NO: 830

SEQ ID NO: 2629 - DNA, 126 bp, Paenibacillus polymyxa; identical to SEQ ID NO: 829
  CDS (1)..(126)

SEQ ID NO: 2630 - protein, 42 aa, Paenibacillus polymyxa; identical to SEQ ID NO: 830

SEQ ID NO: 2631 - protein, 18 aa, Thermobifida fusca
WYTAEWGLELIFVFPRFI

SEQ ID NO: 2632 - protein, 40 aa, Thermobifida fusca; identical to SEQ ID NO: 1050

SEQ ID NO: 2633 - protein, 138 aa, Thermobifida fusca
MSENVVLQRSNVRLSWRTKWAARCAVGAARLLARKPPERIRATLLRLRGEVRPATYEEAKAARDAVLAVSLRCAGLRACLQRSLAIALLCRMRGTWATWCVGVPRRPPFIGHAWVEAEGRLVEEGVGYDYFSRLITVD

SEQ ID NO: 2634 - protein, 610 aa, Thermobifida fusca
MVGCISPYFAVFPDKDVLGQATDRLPAAQTLASHPSGRPWLVGALPADQLLLVEAGERRLAVIGHCSAEPERLRAELAQIDDVAQFDRIARTLDGSFHLVVVVGDQMRIQGSVSGLRRVFHAHVGTARIAADRSDVLAAVLGVSPDPDVLALRMFNGLPYPLSELPPWPGVEHVPAWHYLSLGLHDGRHRVVQWWHPPEAELAVTAAAPLLRTALAGAVDTRTRGGGVVSADLSGGLDSTPLCALAARGPAKVVALTFSSGLDTDDDLRWAKIAHQSFPSVEHVVLSPEDIPGFYAGLDGEFPLLDEPSVAMLSTPRILSRLHTARAHGSRLHMDGLGGDQLLTGSLSLYHDLLWQRPWTALPLIRGHRLLAGLSLSETFASLADRRDLRAWLADIRHSIATGEPPRRSLFGWDVLPKCGPWLTAEARERVLARFDAVLESLEPLAPTRGRHADLAAIRAAGRDLRLLHQLGSSDLPRMESPFLDDRVVEACLQVRHEGRMNPFEFKSLMKTAMASLLPAEFLTRQSKTDGTPLAAEGFTEQRDRIIQIWRESRLAELGLIHPDVLVERVKQPYSFRGPDWGMELTLTVELWLRSRERVLQGANGGDNRS

SEQ ID NO: 2635 - protein, 90 aa, Thermobifida fusca
METTGAEFRLRPEISVAQTDYGMVLLDGRSGEYWQLNDTAALIVQRLLDGHSPADVAQFLTSEYEVERTDAERDIAALVTSLKENGMALP

SEQ ID NO: 2636 - protein, 19 aa, Streptomyces
GLPWGCPSDIPGWNTPWAC

SEQ ID NO: 2637 - protein, 19 aa, Kibdelosporangium
GLPWGCPNDLFFVNTPFAC

SEQ ID NO: 2638 - protein, 43 aa, Kibdelosporangium; identical to SEQ ID NO: 454

SEQ ID NO: 2639 - protein, 43 aa, Artificial Sequence
  Synthetic peptide - Hybrid BI-32169 precursor A
MIKDDEIYEVPTLVEVGDFAELTLGLPWGCPSDIPGWNTPWAC

SEQ ID NO: 2640 - protein, 142 aa, Kibdelosporangium
MTMPVAAETTVPLPWHRHITARLATGSARVLIRLRPRRLRVVLRMVSRGARPATAAQALSARQAVVSVSVRCAGQGCLQRAVATALLCRLAGDWPDWCTGFRTRPFRAHAWVEAEGGAVGEPGDMPLFHTVISVRHPAREAR

SEQ ID NO: 2641 - protein, 197 aa, Kibdelosporangium
MRDRRWRAGVRPSTADAGTKGKGLLVGGNEFLVFPDCPVALDAPGGRTVPHASGRPWLVGDWSDDDIVVISAGTRRLAIVGQARVNVHAVERSLEAAGSVRDLDAVVGTIPGNFHLIASIDGRTRVQGTVSTVRQVFTATIVGTTVAASGPGLLAAATGSRVDGDALALRLVPVVPWPLCLRPVWSGVEQVAAGHWL

SEQ ID NO: 2642 - protein, 86 aa, Kibdelosporangium
MTIALTPNVTATDSEDGLVLLNESTGRYWTLNGTGAATLRLLLAGNSPAQTASRLAERYPDAVDRTQRDVVALLAALRNARLVTSS

SEQ ID NO: 2643 - protein, 22 aa, Artificial Sequence
  Synthetic peptide - PelB secretion sequence (ssPelB)
MKYLLPTAAAGLLLLAAQPAMA

SEQ ID NO: 2644 - protein, 42 aa, Artificial Sequence
  Synthetic peptide - TorA secretion sequence (ssTorA)
MNNNDLFQASRRRFLAQLGGLTVAGMLGPSLLTPRRATAAQA

SEQ ID NO: 2645 - protein, 7 aa, Artificial Sequence
  Synthetic peptide - TEV cleavage site
ENLYFQG

SEQ ID NO: 2646 - protein, 20 aa, Artificial Sequence
  Synthetic peptide - Linker 1
GAAAKGAAAKGAAAKGAAAK

SEQ ID NO: 2647 - protein, 25 aa, Artificial Sequence
  Synthetic peptide - Linker 2
SGGGGSGGGGSGGGGSGGGGSGGGG

SEQ ID NO: 2648 - protein, 202 aa, M13 phage
DCAFHSGFNEDPFVCEYQGQSSDLPQPPVNAGGGSGGGSGGGSEGGGSEGGGSEGGGSEGGGSGGGSGSGDFDYEKMANANKGAMTENADENALQSDAKGKLDSVATDYGAAIDGFIGDVSGLANGNGATGDFAGSNSQMAQVGDGDNSPLMNNFRQYLPSLPQSVECRPFVFSAGKPYEFSIDCDKINLFRGVFAFLLYVA

SEQ ID NO: 2649 - protein, 50 aa, M13 phage
AEGDDPAKAAFNSLQASATEYIGYAWAMVVVIVGATIGIKLFKKFTSKAS

SEQ ID NO: 2650 - protein, 219 aa, Artificial Sequence
  Synthetic peptide - Hemolysin A (HlyA)(806-1024)
QGNSLAKNVLSGGKGNDKLYGSEGADLLDGGEGNDLLKGGYGNDIYRYLSGYGHHIIDDEGGKDDKLSLADIDFRDVAFKREGNDLIMYKAEGNVLSIGHKNGITFKNWFEKESDDLSNHQIEQIFDKDGRVITPDSLKKAFEYQQSNNKVSYVYGHDASTYGSQDNLNPLINEISKIISAAGNFDVKEERSAASLLQLSGNASDFSYGRNSITLTASA

SEQ ID NO: 2651 - protein, 706 aa, Artificial Sequence
  Synthetic peptide - Hemolysin B (HlyB)
MMSKCSSHNSLYALILLAQYHNITVNAETIRHQYNTHTQDFGVTEWLLAAKSIGLKAKYVEKHFSRLSIISLPALIWRDDGKHYILSRITKDSSRYLVYDPEQHQSLTFSRDEFEKLYQGKVILVTSRATVVGELAKFDFSWFIPSVVKYRRILLEVLTVSAFIQFLALITPLFFQVVMDKVLVHRGFSTLNIITIAFIIVILFEVILTGARTYIFSHTTSRIDVELGAKLFRHLLALPVSYFENRRVGETVARVRELEQIRNFLTGQALTSVLDLFFSVIFFCVMWYYSPQLTLVILLSLPCYVIWSLFISPLLRRRLDDKFLRNAENQAFLVETVTAINTIKSMAVSPQMIATWDKQLAGYVASSFRVNLVAMTGQQGIQLIQKSVMVISLWMGAHLVISGEISIGQLIAFNMLAGQVIAPVIRLAHLWQDFQQVGISVERLGDVLNTPVEKKSGRNILPEIQGDIEFKNVRFRYSSDGNVILNNINLYISKGDVIGIVGRSGSGKSTLTKLLQRFYIPETGQILIDGHDLSLADPEWLRRQIGVVLQENILLNRSIIDNITLASPAVSMEQAIEAARLAGAHDFIRELKEGYNTIVGEQGVGLSGGQRQRIAIARALVTNPRILIFDEATSALDYESENIIMKNMSRICKNRTVIIIAHRLSTVKNANRIIVMDNGFISEDGTHKELISKKDSLYAYLYQLQA

SEQ ID NO: 2652 - protein, 479 aa, Artificial Sequence
  Synthetic peptide - Hemolysin D (HlyD)
MRFYMKGLWDLVCRYKTVFSDVWKIRHTLDAPVREKDEYAFLPAHLELIETPVSRRSHFVVWSILLFVIISLLLSVLGKVEVVSVANGKFTHSGRSKEIKPIENAIVEKIMVKDGSFVKKNDPLVELTVPGVESDILKSEASLLYEKTEQYRYAILSESIQRNELPEIRITDFPGGEDNAGGEHFQRVSSLIKEQFMTWQNRKNQKQLTLNKKIVERDAALARVSLYEHQVSQEGRKLNDFKYLLNKKAVSQHSVMEQENSYIQAKNEHAVWLAQVSQLEKEIELVREELALETNIFRSEIIEKHRKSTDNIVLLEHELEKNRQRKASSFIKAPVSGTVQELNIHTEGGVVTTAETLMIIVPDNDILEVTASVLNKDIGFIQPGQEVVIKVDAYPYTRHGYLTGKVKNITADSVSVPDTGLVFNVIISVDRNDIQGERKKIPVTAGMTVMAEIKTGVRSVISYLLSPLKETINESLRER

SEQ ID NO: 2653 - protein, 5 aa, Artificial Sequence
  Synthetic peptide - Enterokinase cleavage site (EK)
DDDDK

SEQ ID NO: 2654 - protein, 371 aa, Artificial Sequence
  Synthetic peptide - Truncated maltose-binding protein (MBP) (deletion 2-29)
MKIEEGKLVIWINGDKGYNGLAEVGKKFEKDTGIKVTVEHPDKLEEKFPQVAATGDGPDIIFWAHDRFGGYAQSGLLAEITPDKAFQDKLYPFTWDAVRYNGKLIAYPIAVEALSLIYNKDLLPNPPKTWEEIPALDKELKAKGKSALMFNLQEPYFTWPLIAADGGYAFKYENGKYDIKDVGVDNAGAKAGLTFLVDLIKNKHMNADTDYSIAEAAFNKGETAMTINGPWAWSNIDTSKVNYGVTVLPTFKGQPSKPFVGVLSAGINAASPNKELAKEFLENYLLTDEGLEAVNKDKPLGAVALKSYEEELAKDPRIAATMENAQKGEIMPNIPQMSAFWYAVRTAVINAASGRQTVDEALKDAQTRITK

SEQ ID NO: 2655 - protein, 19 aa, Burkholderia thailandensis
GTPGFQTPDARVISRFGFN

SEQ ID NO: 2656 - protein, 47 aa, Burkholderia thailandensis; identical to SEQ ID NO: 30

SEQ ID NO: 2657 - protein, 241 aa, Burkholderia thailandensis
MTPASHCHIAVFDQAIVALDMQRSRYFLYDEACAKAFADHYLDFKPIDAPHALKPLISDRIVVAASPASVPKRIADYRGWAFDAFDSGIWASRTLGERSAAGFEWLPFWRIVRGAVSLKMRGFRALSALDRLARLDAGAEQRARTDGGPSRTAERYLRASIWSPFRITCLQMSFALATHLRRENVPAQLVIGVRPMPFVAHAWVEIDGRVCGDEPELKKSYGEIYRTPRHDERAGPFGLAA

SEQ ID NO: 2658 - protein, 535 aa, Burkholderia thailandensis
MTLLEAGARARAYLRDAHSRIERSLARARTLQEARDTVTRSVWGAYLLVLDEAASGRRLFMPDPLHSVRLYYRTDERGRVDVDPRAANLLDRASIDWNLDYLIEFACTQFGPLDETPFASVRVVPPGCALVVGPDGRCAIERAWLPRAQAAGDVRASCAAALDDVYSRIAHSHPSVCAALSGGVDSSAGAIFLRKALGANAPLAAVHLYSTSSPDCYERDMAARVADSIGAQLICIDIDRHLPFSERIVRTPPAALNQDMLFLGIDRAVSNALGPSSVLLEGQGGDLLFRAVPDANAVLDALRSNGWSFALRTAEKLAMLHNDSIPRILLMAAKIALRRRLFGQDAPASQQTMSRLFASSAPRAAAGRSRRHAPRADAPLDESISMLDRFVSIMTPVTDAAYTSRLNPYLAQPVVEAAFGLRSYDSFDHRNDRIVLREIASAHTPVDVLWRRTKGSFGIGFVKGIVSHYDALRELIRDGVLMRSGRLDEAELEHALKAVRVGQNAAAISVALVGCVEVFCASWQNFVTNRHAAVC

SEQ ID NO: 2659 - protein, 376 aa, T4 phage
MTFTVDITPKTPTGVIDETKQFTATPSGQTGGGTITYAWSVDNVPQDGAEATFSYVLKGPAGQKTIKVVATNTLSEGGPETAEATTTITVKNKTQTTTLAVTPASPAAGVIGTPVQFTAALASQPDGASATYQWYVDDSQVGGETNSTFSYTPTTSGVKRIKCVAQVTATDYDALSVTSNEVSLTVNKKTMNPQVTLTPPSINVQQDASATFTANVTGAPEEAQITYSWKKDSSPVEGSTNVYTVDTSSVGSQTIEVTATVTAADYNPVTVTKTGNVTVTAKVAPEPEGELPYVHPLPHRSSAYIWCGWWVMDEIQKMTEEGKDWKTDDPDSKYYLHRYTLQKMMKDYPEVDVQESRNGYIIHKTALETGIIYTYP

SEQ ID NO: 2660 - protein, 80 aa, T4 phage
MASTRGYVNIKTFEQKLDGNKKIEGKEISVAFPLYSDVHKISGAHYQTFPSEKAAYSTVYEENQRTEWIAANEDLWKVTG
